(19) United States
(12) Patent Application Publication
(10) Pub. No.: US 2011/0076235 A1
(43) Pub. Date: Mar. 31, 2011

(54) GENES, METHODS, AND COMPOSITIONS RELATED TO NEUROGENESIS AND ITS MODULATION

(76) Inventors: Timothy P. Tully, Solana Beach, CA (US); Hollis T. Cline, Solana Beach, CA (US)

(21) Appl. No.: 12/893,236

(22) Filed: Sep. 29, 2010

Related U.S. Application Data
(60) Provisional application No. 61/246,967, filed on Sep. 29, 2009.

(51) Int. Cl. A61K 49/00; C12Q 1/68; C12Q 1/02; C12Q 1/06; C07H 21/00; C07H 21/02; A61K 31/7088; A61K 31/713; A61P 25/00

(52) U.S. Cl. 424/9.2; 435/6; 435/29; 435/39; 536/24.5; 514/44 A

(57) ABSTRACT

The present disclosure provides methods for investigating neurogenesis, neural cell proliferation and differentiation. Specifically, the present disclosure relates to methods for identifying pharmaceutical agents capable of modulating neurogenesis and neural cell proliferation, methods of screening for genes that modulate neurogenesis and proliferation of neural progenitor cells, and methods of identifying pharmaceutical agents as candidate modulators of neurogenesis and neural proliferation or differentiation. The present disclosure also relates to methods for identifying pharmaceutical agents to characterize and modulate neurogenesis, pharmaceutical agents identified by such methods, methods for treating patients with such pharmaceutical agents, and compositions containing such pharmaceutical agents. Accordingly, the present methods enable elucidation of the mechanisms that control neurogenesis, brain development and function in healthy animals and in disorders of the nervous system. Furthermore, the present methods facilitate the development of compositions to prevent, improve or stabilize impaired neurogenesis in various nervous system disorders, including cognitive disorders.

### RELATED APPLICATIONS

[0001] The present application claims priority under 35 U.S.C. §119 to U.S. Provisional Pat. App. No. 61/246,967, filed on Sep. 29, 2009, which is expressly incorporated herein by reference in its entirety.

### SEQUENCE LISTING

[0002] The instant application contains a Sequence Listing which has been submitted in ASCII format via EFS-Web and is hereby incorporated by reference in its entirety. Said ASCII copy, created on Sep. 28, 2010, is named 21RE6550.txt and is 2,011,425 bytes in size.

### FIELD OF THE INVENTION

[0003] The present invention relates to genes, methods, and compositions involved in neurogenesis, particularly activity-dependent modulation of neurogenesis in the central nervous system. More particularly, the present invention relates to methods for identifying and manipulating genes involved in neurogenesis and for screening and evaluating pharmaceutical agents that modulate neurogenesis.

### BACKGROUND OF THE INVENTION

[0004] Neurogenesis is a complex process that underlies the development and maturation of the nervous system. This process is dependent on proper spatiotemporal regulation of cell proliferation, survival, differentiation and migration. Newly produced nerve cells are able to differentiate into functional cells of the central nervous system and integrate into neural circuits in the brain. Moreover, in the brains of many animals, new nerve cells are continuously generated throughout the life span of the organism. For example, neurogenesis is now known to persist throughout adulthood in two regions of the mammalian brain: the subventricular zone (SVZ) of the lateral ventricles and the dentate gyrus of the hippocampus. In these regions, multipotent neural progenitor cells (NPCs) continue to divide and give rise to new functional neurons and glial cells (Jacobs, Mol. Psychiatry 2000, 5(3): 262-9). Control of neurogenesis therefore underlies the regional specialization of the CNS and the establishment of specific cell types that make up functional circuits.

[0005] Neurogenesis plays a fundamental role in CNS physiology. The pool of neural progenitor cells (NPCs) can be expanded by symmetric divisions that give rise to additional NPCs or depleted by terminal differentiation of progeny into neurons or glia (Butt et al., Neuron 2005, 48: 591-604; Gotz et al., Nat Rev Mol Cell Biol 2005, 6: 777-788; Huttner et al., Curr Opin Cell Biol 2005, 17: 648-657; Noctor et al., Arch Neurol 2007, 64: 639-642; Kriegstein et al., Ann Rev Neurosci 2009, 32: 149-184). Maintaining NPCs in an actively proliferative state can therefore enlarge the progenitor pool and can enlarge the cerebral cortex of mice (Chenn et al., Science 2002, 297: 365-369; Lehmann et al., Eur J Neurosci 2005, 21: 3205-3216). Conversely, premature transition of NPCs from a proliferative to differentiated state can deplete the progenitor pool; in the short-term, this can increase the generation of differentiated neurons and glia, but in the long-term, depletion of the progenitor pool limits future generation of neural progeny.). Cortical size can also be altered by increasing or decreasing the survival of NPCs. (Depaepe et al., Nature 2005, 435: 1244-1250; Putz et al., Nat. Neurosci. 2005, 8: 322-331).

[0006] Disruptions in neurogenesis can play a fundamental role in diseases and disorders of the CNS. Neuronal cell number is largely determined by proliferation of NPCs and the survival and differentiation of their progeny. While these steps can be regulated independently, they also must be properly coordinated to establish properly functioning circuits within the nervous system. Indeed, errors in the generation of neurons and their assembly into circuits can lead to numerous neurological disorders including heterotopias, mental retardation, autism spectrum disorders, epilepsy, focal cortical dysplasia. Alterations in the production of neuronal cell types can lead to a disproportionate ratio of excitatory and inhibitory circuits in the brain, an imbalance that may underlie autism spectrum disorders, depression and schizophrenia.

[0007] These observations underscore the crucial role of mechanisms modulating NPC proliferation and the fate of their progeny. Mechanisms that regulate cell proliferation can be classified as cell-autonomous or non-cell-autonomous. With respect to cell-autonomous mechanisms, tremendous progress has recently been made in identifying factors required for pushing cells into a ‘pluripotent/multipotent’ state and for maintaining this state. (Welstead et al., Curr. Opin. Genet. Dev. 2008, 18: 123-129).

[0008] Less well-understood, however, are non-cell autonomous mechanisms, which depend on neural activity in vivo. Elucidating the mechanisms that control neurogenesis in intact animals is therefore crucial to a proper understanding of brain development and function in healthy animals and in disorders of the nervous system. It is also crucial to the development of methods and compositions to prevent, improve and/or stabilize neurogenesis (e.g., modulate), and specifically impaired neurogenesis, in the nervous system and specifically in nervous system disorders, including cognitive disorders.

[0009] The present invention meets these and other needs in the art by providing targets, methods, and compositions that relate to the modulation of neurogenesis in an activity dependent manner.

### SUMMARY OF THE INVENTION

[0010] In a first aspect, the present disclosure relates to a method comprising contacting neural progenitor cells in an intact brain region of a first animal with a pharmaceutical agent, exposing the first animal and a second control animal to an external stimulus capable of eliciting activity in the intact brain region, and measuring proliferation rates of the neural progenitor cells in the first animal and of neural progenitor cells in the second animal, in any order, wherein a difference in proliferation rate between the neural progenitor subject cells and the neural progenitor control cells identifies the pharmaceutical agent as one capable of modulating neural proliferation.

[0011] In certain embodiments, the first and second animals may be vertebrates, including amphibians and mammals. More particularly, the first and second animals may be Xenopus laevis, and more specifically may be tadpoles of Xenopus laevis.

[0012] In certain embodiments, the intact brain region may be involved in processing olfactory inputs, visual inputs, or mechanosensory inputs, or may be involved in mediating behavioral outputs. In specific embodiments, the first and second animals may be Xenopus laevis and the intact brain region may be the optic tectum. The intact brain region can also comprise circuits of the telencephalon, midbrain, hindbrain/spinal cord, retina, or olfactory pit.

[0013] In certain embodiments, measuring the proliferation rates of the neural progenitor cells in the experimental and control animals comprises counting the number and type of cells in the optic tectum of the first and second animals.

[0014] In some embodiments, contacting the neural progenitor cells with pharmaceutical agent may comprise electroporating said pharmaceutical agent into said neural progenitor cells.

[0015] In another aspect, the present disclosure relates to a method comprising contacting neural progenitor subject cells with a pharmaceutical agent in an amount effective to modulate expression of one or more genes in said neural progenitor subject cells, measuring proliferation rates of the neural progenitor subject cells and of neural progenitor control cells that have not been contacted with the pharmaceutical agent, and comparing the proliferation rates of the neural progenitor subject cells and the neural progenitor control cells, in any order, wherein a difference in proliferation rate between the neural progenitor subject cells and the neural progenitor control cells identifies the one or more genes as modulators of proliferation of neural progenitor cells.

[0016] In certain embodiments, the neural progenitor subject cells may be in a first animal and the neural progenitor control cells may be in a second animal. In some embodiments, the neural progenitor subject and control cells may be in the optic tectum of each of the first and second animals respectively. In one embodiment, the first and second animals may be Xenopus laevis.

[0017] In some embodiments, the method may further comprise introducing a reporter construct into the neural progenitor subject cells and the neural progenitor control cells. In certain embodiments, the reporter construct may comprise a gene encoding a fluorescent protein. In one embodiment, expression of the fluorescent protein may be restricted spatially, in particular to a specific cell type, such as neural progenitor cells. In another embodiment, expression of the fluorescent protein may also be restricted temporally, for example, restricted to progeny cells produced in a brain region after a particular point in time, In other embodiments, introducing the a reporter construct into the neural progenitor subject cells may comprise transfecting the cells with a plasmid encoding the reporter construct.

[0018] In some embodiments, measuring the proliferation rates of the neural progenitor cells may comprise counting the number and type of cells before and after at least one predetermined time period.

[0019] In another embodiment, the method may further comprise exposing the first and second animals to a visual stimulus.

[0020] In some embodiments, the pharmaceutical agent may comprise a chemical compound or an antisense oligonucleotide. In certain embodiments, the antisense oliogonucleotide may comprise an siRNA, an shRNA and/or a morpholino.

[0021] In another embodiment of the present method, the one or more genes in the neural progenitor subject cells may be selected from SEQ. ID. NOs. 1-651, or functional truncations, modifications and/or substitutions thereof.

[0022] In another aspect, the present disclosure relates to a method comprising contacting neural progenitor subject cells with a pharmaceutical agent, measuring proliferation rates of the neural progenitor subject cells and of neural progenitor control cells that have not been contacted with the pharmaceutical agent, comparing the proliferation rates of the neural progenitor subject cells and the neural progenitor control cells, in any order, wherein a difference in proliferation rate between the neural progenitor subject cells and the neural progenitor control cells identifies the pharmaceutical agent as one capable of modulating proliferation.

[0023] In some embodiments, the method may comprise introducing a reporter construct into the neural progenitor subject cells and the neural progenitor control cells. In certain embodiments, the reporter construct may comprise a gene encoding a fluorescent protein. In some embodiments, the fluorescent protein may be specifically expressed in neural progenitor cells.

[0024] In some embodiments, introducing the reporter construct into the neural progenitor cells comprises transfecting neural progenitor cells with a plasmid encoding the reporter construct.

[0025] In some embodiments, contacting the neural progenitor subject cells with a pharmaceutical agent comprises electroporating the pharmaceutical agent into the neural progenitor subject cells.

[0026] In certain embodiments, the method may further comprise exposing the first and second animals to a visual stimulus.

[0027] In a fourth aspect, the present disclosure relates to a method comprising administering a pharmaceutical agent to subject cells expressing a target gene selected from the group consisting of SEQ ID NOs. 1-651, or functional truncations, modifications and/or substitutions thereof, comparing expression of the target gene in the subject cells administered the pharmaceutical agent compared with expression of the target gene in subject cells not administered the pharmaceutical agent, in any order, wherein a difference in expression of the target gene in subject cells administered the pharmaceutical agent compared with subject cells not administered the pharmaceutical agent identifies the pharmaceutical agent as a candidate modulator of neural proliferation or differentiation.

[0028] In another aspect, the present disclosure relates to pharmaceutical agents identified by the methods described herein.

[0029] In still another aspect, the present disclosure relates to pharmaceutical compositions comprising a pharmaceutical agent identified by the methods described herein.

[0030] In still another aspect, the present disclosure relates to methods for treating a patient comprising administering compounds identified be by the methods described herein.

[0031] The present invention comprises methods for investigating the phenomenon of neural cell proliferation and differentiation, pharmaceutical agents identified by such methods, compositions containing the same and methods of treatment comprising administering such pharmaceutical agents or compositions. Accordingly, the present disclosure provides methods of identifying genes implicated in the regulation of neurogenesis, methods for identifying pharmaceutical agents to characterize and modulate neurogenesis, and modulators and/or treatments for the nervous system and specifically various nervous system disorders and/or injuries including methods and compositions to prevent, improve and/or stabilize neurogenesis (i.e., modulate), and specifically impaired neurogenesis, in the nervous system and specifically in nervous system disorders, including cognitive disorders. The present invention also comprises pharmaceutical agents selected by the methods of the present invention, as well as pharmaceutical compositions comprising such selected pharmaceutical agents, as well as methods of administering such pharmaceutical agents and compositions to patients, wherein patients include human patients and wherein said administering is for the purpose of modulating neurogenesis and specifically to prevent, improve and/or stabilize neurogenesis and specifically impaired neurogenesis, in the nervous system and specifically in nervous system disorders, including cognitive disorders, in patients and specifically in humans.

### BRIEF DESCRIPTION OF THE FIGURES

[0032] FIG. 1 depicts the transparent brain of a Xenopus laevis tadpole (A); the optic tectum region of the brain (B); and proliferation and differentiation of cells within the tectal lobe (C).

[0033] FIG. 2 is a diagram showing the different lineages of neural progenitor cells (NPCs).

[0034] FIG. 3 is a diagram of a proliferation reporter that facilitates spatial and temporal resolution of labeled cells imaged in the intact brain.

[0035] FIG. 4 is an image showing the proliferation of NPCs over a 24-hour period in the optic tectum of Xenopus laevis.

[0036] FIG. 5 is a graph showing decreased proliferation rate of tectal cells following exposure to cell division blockers.

[0037] FIG. 6 is graph showing tectal proliferation rates in the presence or absence of cell division blockers on day 1 without visual stimulation and day 2 with visual stimulation (A); and the percent of tectal neurons in the presence or absence of cell division blockers on day 3 (B).

[0038] FIG. 7 is a graph showing tectal proliferation rates in animals expressing a morpholino against Deiodinase iodothyronine type III (dio3-MO) with and without visual stimulation, compared to control animals.

[0039] FIG. 8 is a graph showing the percent of tectal neurons and glial cells in animals expressing a morpholino against Glutathione S-transferase Pi 1 (GSTpi-MO) over three days, compared to control animals.

[0040] FIG. 9 is a graph showing tectal proliferation rates (A) and the percent of tectal neurons and glial cells (B) in animals expressing a morpholino against one of 11 genes of interest (GOIs) over three days, compared to control animals. GOIs: Heat shock protein 70 (HSPA5); Ephrin receptor type B-1 (EphRB1); Deiodinase iodothyronine type III (Dio3); ETS domain-containing protein Elk-4 (ELK4); Wingless-type MMTV (murine mammary tumor virus) integration site family, member 7b (Wnt7b); Fragile X mental retardation, autosomal homolog (FXR1); Fragile X mental retardation protein 1 (FMR1A); Matrix metallopeptidase 9 (MMP9), cAMP-dependent protein kinase catalytic subunit alpha (PRKACA), Neuritin 1-A (cpg15); Glutathione S-transferase Pi 1 (GSTPi).

### DETAILED DESCRIPTION OF THE INVENTION

[0041] Unless otherwise defined, all technical and scientific terms used herein have the same meaning as commonly understood by one of ordinary skill in the art. Although methods and materials similar or equivalent to those described herein can be used in the practice or testing of the present invention, suitable methods and materials are described herein. All publications, patent applications, patents, and other references mentioned herein are incorporated by reference in their entirety. In addition, the materials, methods, and examples are illustrative only and are not intended to be limiting.

[0042] Reference is made to standard laboratory manuals that contain definitions and methods and means for carrying out basic techniques encompassed by the present invention. See, for example, Sambrook et al., Molecular Cloning: A Laboratory Manual, Third Edition, Cold Spring Harbor Laboratory Press, New York (2001); Current Protocols in Molecular Biology, Ausubel et al. (eds.), John Wiley & Sons, Inc., Hoboken, N.J. (2010), Current Protocols in Cell Biology, Bonifacino et al. (eds.), John Wiley & Sons, Inc., Hoboken, N.J. (2010); Current Protocols in Immunology, Coligan et al. (eds,), John Wiley & Sons, Inc., Hoboken, N.J. (2010); Current Protocols in Neuroscience, Gerfen et al. (eds.), John Wiley & Sons, Inc., Hoboken, N.J. (2010); Current Protocols in Nucleic Acid Chemistry, Egli et al. (eds.), John Wiley and Sons, Inc., Hoboken, N.J. (2010); Current Protocols in Pharmacology, Enna et al. (eds.), John Wiley and Sons, Inc., Hoboken, N.J. (2010); and the various references cited therein.

### Definitions

[0043] As used in the present disclosure, the term “about” or “approximately” means within an acceptable range for a particular value as determined by one skilled in the art, and may depend in part on how the value is measured or determined, e.g., the limitations of the measurement system or technique.

[0044] The terms “a,” “an” and “the” are to be understood as meaning both singular and plural, unless explicitly stated otherwise. Thus, “a,” “an,” and “the” (and grammatical variations thereof where appropriate) generally refer to one or more.

[0045] As used herein, “neurogenesis” includes the proliferation, survival, differentiation, and migration of a neural cell in vivo, in vitro, or ex vivo. The cells may be located in or obtained or originated from the central nervous system or elsewhere in an animal or human being (e.g., the peripheral nervous system). Neurogenesis is intended to include neurogenesis as it occurs during normal development, as well as neural regeneration that occurs following disease, damage or therapeutic intervention. Embodiments of the disclosed invention include the detection or measurement of either proliferation or differentiation as non-limiting indicators of neurogenesis.

[0046] An “external stimulus” is broadly defined to encompass any type of simple or complex extracellular stimulus that can induce neural activity. Thus an external stimulus includes inputs to the visual system of an animal. It also includes input to other brain regions, such as those involved in processing olfactory, mechanosensory, or visual inputs, and in mediating behavioral outputs.

[0047] The term “modulate” as used herein includes altering the expression of a gene, or level of RNA molecules or equivalent RNA molecules, including non-coding RNAs and those encoding one or more proteins or protein subunits. “Modulate” also includes altering activity of one or more gene products (including non-coding RNAs), proteins, or protein subunits, such that expression, level, or activity in the presence of a modulator differs from that observed in the absence of a modulator. For example, the term “modulate” can mean “up-regulate” or “down-regulate,” although use of the word “modulate” is not limited to these definitions. Modulation can be an increase or a decrease in expression or activity, a change in binding characteristics of a gene product, or any other change in the biological, functional, or immunological properties of biologically active molecules.

[0048] “Modulation of neurogenesis” or “modulating neurogenesis” includes changes in cell proliferation, survival, differentiation, or migration. Such a change can occur in a cell or population of cells, including those within an intact brain region. Non-limiting examples include increased (or decreased) levels of an inducer (or inhibitor) of neurogenesis, such as changes in the level of a gene product directly involved in NPC proliferation. Such changes may also include a difference in cell differentiation or cell migration within a neural circuit. In certain embodiments, modulating neurogenesis refers to effects on cell proliferation and on cell fate (e.g., neuronal versus glial).

[0049] The terms “modulator,” “compound” and “pharmaceutical agent” may be used interchangeably herein, and include pharmacologically active substances in isolated form, or mixtures thereof. For example, a pharmaceutical agent, compound or modulator may be an isolated and structurally-defined product, an isolated product of unknown structure, a mixture of several known and characterized products, or an undefined composition comprising one or more products. Examples of such undefined compositions include for instance tissue samples, biological fluids, cell supernatants, vegetal preparations, etc. The pharmaceutical agent, compound or modulator may be any organic or inorganic product, including a polypeptide (or a protein or peptide), a nucleic acid, a lipid, a polysaccharide, a chemical entity, or mixture or derivatives thereof. The pharmaceutical agent, compound or modulator may be of natural or synthetic origin, and the compound(s) or modulators may include libraries of compounds.

[0050] A “modulator,” “compound,” or “pharmaceutical agent” can increase (or decrease) the amount, degree, or nature of a neurogenic response in vivo, in vitro, or ex vivo, relative to the amount, degree, or nature neurogenesis in the absence of the agent or reagent. In certain embodiments, treatment with such a “neurogenic” agent may increase (or decrease) the amount, degree, or nature of a neurogenic response by at least about 1%, 2%,3%, 4%, 5%, 10%, 20%, 40%, 50%, 75%, 100%, 200% (2 fold), 300% (3 fold), 400% (4 fold), 500% (5 fold), or still more or less, compared to the amount, degree, or nature or a neurogenic response in the absence of the agent, under the conditions of the method used to detect or determine neurogenesis.

[0051] The terms “inhibit,” “down-regulate,” or “reduce” include decreasing expression of a gene, or level of RNA molecules or equivalent RNA molecules encoding one or more proteins or protein subunits, or activity of one or more gene products, proteins or protein subunits below that observed in the absence of one or more modulators (e.g., siRNA, shRNA, antisense morpholino, etc.) as defined in the claimed methods. The terms “enhance” or “up-regulate” includes increasing expression of a gene, or level of RNA molecules or equivalent RNA molecules encoding one or more proteins or protein subunits, or activity of one or more gene products, proteins or protein subunits below that observed in the absence of one or more modulators as defined in the claimed methods.

[0052] The term “target gene” or “gene or interest” includes not just protein-coding genes but non-coding genes. Such non-coding genes include those encoding ribosomal RNAs (rRNAs), transfer RNAs (tRNAs), and small nuclear RNAs (snRNAs), as well as microRNAs, snoRNAs, siRNAs , piRNAs, and ncRNAs. It can also include a polynucleotide region that regulates replication, transcription, translation, or other processes important to expression of the gene product, or a polynucleotide comprising both a region that encodes a gene product and a region operably linked thereto that regulates expression. The targeted gene may be chromosomal (genomic) or extrachromosomal. It may be endogenous to the cell, or it may be a foreign gene (a transgene). The foreign gene may be integrated into the host genome, or it may be present on an extrachromosomal genetic construct such as a plasmid or a cosmid. The targeted gene may also be derived from a pathogen, such as a virus, bacterium, fungus or protozoan, which is capable of infecting an organism or cell. Target genes may be viral and pro-viral genes. In a specific embodiment, a target gene is one involved in or associated with the progression of cellular activities important to neurogenesis.

[0053] The term “target nucleic acid” includes any nucleic acid sequence whose expression or activity is to be modulated. The target nucleic acid may be DNA or RNA. Furthermore, the target gene or gene may comprise fragments of larger nucleic acid sequences that are generally biologically active.

[0054] Reference will now be made to the several embodiments of the present disclosure, examples of which are illustrated by and described in conjunction with the accompanying drawings and examples. While certain embodiments are described herein, it will be understood that the described embodiments are not intended to limit the scope of the invention as defined by the appended claims. On the contrary, the present disclosure is intended to cover alternatives, modifications and equivalents that may be included within the spirit and scope of the invention as defined by the appended claims. Furthermore, in the present disclosure certain details are provided to convey a thorough understanding of the invention defined by the appended claims. However, it will be apparent to those skilled in the art that certain embodiments may be practiced without these details. In certain instances, well-known methods, procedures, or other specific details have not been described to avoid unnecessarily obscuring aspects of the invention defined by the appended claims.

### Methods of Identifying and Characterizing Genes Involved in Neurogenesis

[0055] Xenopus laevis as a Model System

[0056] Xenopus laevis has proven advantageous for in vivo studies of neurogenesis and brain development. Several factors underlie these advantages:

[0057] Compact Period of Neurogenesis

[0058] Frog tadpoles have a relatively prolonged and accessible period of cell proliferation and differentiation that extend through the larval period of CNS development. Over the course of the pre-metamorphic stages of development of X. laevis, new neurons are generated via cell proliferation. The newly formed neurons then integrate into the functional circuitry of the developing tadpole brain. The neurogenic sequence from birth to differentiation of individual neurons can be captured in a 2-4 day period in X. laevis, as opposed to over a month in mammalian systems.

[0059] This compact time frame facilitates detailed investigations into the different steps comprising neurogenesis. This advantage, together with the evidence that mechanisms of neurogenesis are evolutionarily conserved, underscores the value of Xenopus not only in revealing fundamental mechanisms of neurodevelopment of relevance to mammalian systems but also in providing an experimental model system for studying human neurodevelopmental diseases.

[0060] Accessible Brain Circuitry

[0061] Studies on neuronal development and circuit formation in frogs have revealed several fundamental mechanisms of brain development which have subsequently been shown to function in mammals, including humans. The CNS is highly regionalized along the anterior-posterior axis of X. laevis and different CNS regions are composed of specific neural circuits, with unique functions, including sensory input processing, information integration, memory, decision-making, and motor control.

[0062] Anterior-posterior patterning of neural progenitors in the ventricular layer of the CNS is fundamental to the subsequent regional specialization of brain function, and is thought to be established by evolutionarily conserved expression patterns of transcription factor families, such as Otx, Pax and Hox in neural progenitors, followed by activation of transcriptional cascades that define regional subsets of progenitors and their neuronal progeny (O'Leary et al., Curr. Opin. Neurobiol. 2008, 18: 90-100; Lichtneckert et al., Adv. Exp. Med. Biol. 2008, 628: 32-41).

[0063] Indeed, Hox family transcription factors not only regulate progenitors and cell fate along the anterior-posterior axis from telecephalon to spinal cord, but also specify contacts between neurons in developing circuits by virtue of controlling downstream transcription factor cascades as neurons differentiate. (Dasen et al., Curr. Top. Dev. Biol. 2009, 88: 169-200; Dalla Torre di Sanguinetto et al., Curr. Opin. Neurobiol. 2008, 18: 36-43.)

[0064] The embodiments of the present invention encompass methods for analyzing the transcriptome in different brain circuits and cell types. These include the telencephalon, the midbrain and the hindbrain/spinal cord, as well as the retina and olfactory pit. Each of these regions is characterized by distinct sets of NPC progeny. For example, the telencephalon receives and processes olfactory inputs and includes regions includes regions homologous to the hippocampus and basal ganglia, which are involved in memory and movement control (Maier et al., J Chem Neuroanat, 40(1): 21-35; Brox et al., J Comp Neurol 2004, 474(4): 562-77). The midbrain processes mechanosensory and visual inputs (Hiramoto et al., Dev Neurobiol 2009, 69(14): 959-71; Deeg et al., J Neurophysiol 2009, 102(6): 3392-404) and the hindbrain and spinal cord mediate behavioral outputs (Soffe et al., J Physiol 2009, 587(Pt 20): 4829-44; Orger et al., Nat Neurosci 2008, 11(3): 327-33).

[0065] The methods of the instant invention not only encompass analysis of distinct brain regions but also specialized cell types within such circuits. Distinct circuits in each brain area are thought to be composed of unique combinations of excitatory and inhibitory neurons with cell-specific transcript composition, which endow the region-specific circuits with particular properties. Accordingly, the methods of the present invention include analysis of the transcriptome of identified neurons, such as GABAergic and glutamatergic neurons in the brain regions described here.

[0066] In some embodiments, the methods may be directed to the optic tectum region of X. laevis. The optic tectum is the primary visual center in nonmammalian vertebrates; it is a paired structure that forms a major component of the midbrain (or mesencephalon) and receives inputs from retinal fibers in a topographically ordered manner. See, for example, Dingwell et al., J. Neurobiol. 2000, 44: 246-259.

[0067] Direct Imaging

[0068] NPC proliferation and differentiation may be directly observed in pre-metamorphic (tadpole stages) Xenopus laevis. FIG. 1A shows the transparent head of a tadpole, with the brain indicated by a box. FIG. 1B is a more detailed view of the region of the brain that includes the optic tectum. FIG. 1C shows the relative location of neural cells (visualized with BrdU) in the optic tectum at 2 hours and at 6 days; newly generated cells differentiate into neurons which migrate away from the ventricular layer. (Wu et al., J. Neuroscience 1999, 19(11): 4472-4483).

[0069] Xenopus tadpoles are therefore amenable to in vivo time-lapse imaging, so that neural progenitor cells (NPCs) and their progeny can be identified and imaged in the intact animal. In this regard, NPCs are undifferentiated radial glia that can divide in distinct modes, as depicted in FIG. 2. In a first mode, a single NPC may divide and form two daughter NPCs (e.g., a “proliferating mode”). In a second mode, a single NPC may divide to form one daughter NPC and one daughter neuron (e.g., a “mixed mode”). In a third mode, a single NPC may divide to form two daughter neurons (a “differentiating mode” or “terminal mode.” See Kriegstein et al., Ann Rev Neurosci 2009, 32: 149-184).

[0070] Neurogenic Reporters

[0071] Such imaging provides a basis for methods to identify and analyze distinct cell types based on morphology as well as developmental stage. The instant application encompasses the use of multiple cell reporters to facilitates such analyses. For example, such reporters allow tagging and time-lapse monitoring or neural progenitor cells, as well as different populations of differentiated cells, such as GABAergic or glutamatergic neurons

[0072] Accordingly, in some embodiments, the present methods may employ a reporter that is specific to dividing NPC cells. For example, the reporter may comprise a binary Gal4-UAS (upstream activation sequence) reporter system (Hartley et al., Proc Nat Acad Sci 2002, 99(3): 1377-1382). FIG. 3 shows an exemplary Gal4-UAS reporter system, which comprises two components: a Gal4 driver and a UAS-reporter. The sequences that control expression of Gal4 will therefore dictate expression of the UAS-reporter.

[0073] In the example shown in FIG. 3, the controlling region of Gal4 comprises multiple enhancer elements from the promoter of the fibroblast growth factor 4 (FGF4) gene. Activation of this controlling region requires binding to endogenous sox2/oct3 transcription factors, which are expressed in proliferating NPCs but are not present at significant levels in differentiated, non-proliferating neurons. Hence, this system allows the specific detection of a UAS-reporter in proliferating NPCs.

[0074] The reporter may include any marker of interest. In some embodiments, such as that shown in FIG. 3, it may encode a fluorescent protein,(e.g., Kaede fluorescent protein or green fluorescent protein (GFP)), or any other suitable reporter which can be detected or visualized. Accordingly, cells that are actively dividing express the reporter (e.g., Kaede or GFP) protein. In the case of NPCs, daughter cells remaining in the proliferative state, (e.g., are dividing in proliferative mode or in mixed mode (wherein one daughter cell is an NPC) continue to express, for example, the Kaede fluorescent protein. In contrast, division of an NPC in terminal mode will give rise to two differentiated neurons that cease to divide and thus will express little or no Kaede fluorescent protein and will only contain residual Kaede protein inherited during cytokinesis. Accordingly, the above-described Gal4-UAS reporter system can provide a measure of proliferation of NPCs.

[0075] The above-described Gal4-UAS reporter system is an exemplary reporter system. However, any suitable reporter system may be employed (e.g., a one-component system or other two-component system). In other embodiments, it may include a gene product that can modulate function in the targeted cell. Indeed, the system allows one to use multiple UAS-reporters in concert with a Gal4 driver.

[0076] Moreover, the reporter may have additional properties, such as those allowing temporal resolution of neural cells in vivo. One such reporter is the photoconvertible fluorescent protein Kaede shown in FIG. 3. The Kaede protein exhibits a green fluorescent emission spectrum, but it can be photoconverted to exhibit a red fluorescent emission spectrum upon exposure to either UV light, a 405 nm laser, or any other suitable light source. Accordingly, the photoconvertible property of Kaede enables a temporal control element in observing and characterizing NPC behavior.

[0077] For example, NPCs can be transfected with the above-described Gal4-UAS reporter having a Kaede fluorescent effector element. Proliferating cells expressing the reporter will produce daughters with green Kaede protein. After a preferably predetermined period of time (e.g., 1 h, 2 h, 4 h, 8 h, 12, h, 16 h, 20 h, 24 h, 30 h, 36 h, 48 h, 72 h, 96 h, 168 h, or any other value or ranges of values therein), the NPC cells containing Kaede protein may be exposed to a light source (e.g., a 405 nm laser, UV light, etc. . . . ) to photoconvert Kaede protein from green to red. Newly produced progeny would inherit the red Kaede protein during cytokinesis, but those NPCs that remain undifferentiated would produce green Kaede protein (Caron et al., Development 2008, 17: 107-117). Accordingly, newly generated daughter cells may be distinguished from parent cells, and the relative numbers of parent and daughter cells may be determined by measurement of the relative levels of green to red Kaede protein. This measurement may also provide an estimate of the relative proportions of each type of cell division (e.g., proliferation, mixed, terminal).

[0078] A reporter system suitable for use in the present methods may be introduced into the cells or tissue of interest by any suitable technique known in the art (e.g., transfection, etc. . . . ). In certain embodiments, the reporter system may be constructed on a plasmid, and may be introduced into the cell via, for example, electroporation (Haas et al., Differentiation 2002, 70: 148-154).

### Differential Screening by Microarray Analysis

[0079] In some embodiments, the present methods enable identification of genes involved in neurogenesis, and in particular, NPC proliferation and differentiation. Identification of candidate genes may be performed by, for example, microarray analysis of nucleic acids in radial glia and differentiated neurons, respectively. Such microarray techniques are well known to those in the art. Cells may be selected based on morphology and separated into different populations prior to processing for microarray analysis. For example, cells may be separated based on their characterization as either NPCs or differentiated neurons. Alternatively, cell populations (or animals containing such cell populations of interest) may be exposed to conditions and/or stimuli that either promote or suppress differentiation.

[0080] The well-characterized development of the X. laevis tadpole nervous systems provided a basis for identifying candidate genes involved in neurogenesis. For example, genes of interest (e.g., SEQ ID NOs. 1-651), or functional truncations, modifications and/or substitutions thereof, can be identified via comparative microarray analysis of genes expressed in differentiated neurons compared to undifferentiated NPCs in X. laevis (see, e.g., Example 2 below). In one embodiment, cells from the optic tectum of X. laevis are harvested at different days during neurodevelopment, for example at day 1 and day 5. Cells harvested at day 1 will have a larger proportion of undifferentiated NPCs compared to cells harvested at day 5, which will have a larger proportion of differentiated neurons. Genes that showed differential expression and specifically a significant (e.g., p<0.05, 0.04, 0.03, 0.02, 0.01 or less, or any other value therein) differential expression in cells harvested at day 1 relative to those harvested at day 5 represent genes of interest in regulation or modulation of NPC proliferation and differentiation.

[0081] In another experimental protocol, cells can be harvested from the brain region of animals that have received or not received an external stimulus of inputs to that region, such as light, an olfactory cue, or mechanosensory stimulation. In one embodiment, the cells are harvested from the optic tectum of animals maintained in the dark and from animals exposed to light. Typically, the cells from animals exposed to dark and light are harvested at the same time (e.g., after 12 hr, 24 hr, 48 hr, 72 hr, etc.) and then microarray analysis of genes contained therein is performed. As discussed herein (see Examples 1 and 2 below), cells harvested from animals maintained in the dark generally have a have a higher proportion of undifferentiated NPCs. Cells exposed to light over the same period generally have a higher relative proportion of differentiated neurons. Accordingly, microarray analysis of these two populations can reveal genes differentially expressed (p<0.01) in cells from animals maintained in the dark (e.g., having a greater relative proportion of NPCs) relative to cells harvested from animals exposed to light, thus identifying those genes as being implicated in NPC proliferation and differentiation.

[0082] For example, as described herein, exposure of Xenopus to light has been shown to promote NPC differentiation into neurons in the optic tectum. Accordingly, animals exposed to light may display a higher proportion of differentiated neurons relative to a control animal maintained in the dark. Thus, individual Xenopus animals may be exposed to either dark or light conditions over a period of time (e.g., 12 h, 24 h, 1 day, 2 days, 3 days, 4 days, 7 days, etc. . . . ), and then cells from, for example., the optic tectum, may be collected from the animals and subjected to microarray analysis. Alternatively, animals maintained for longer periods of time will have increasingly developed optic tecta. Accordingly, cells harvested from animals after 24 hours and analyzed via microarray may have a greater proportion of NPCs relative to those harvested from an animal after, for example., 2 days, 3 days, 5 days, 7 days, or more. In either case (light vs. dark or earlier vs. later), the cell populations harvested from the tecta of a first animal population typically have more NPCs and the remaining population from a second animal typically have more differentiated neurons. Accordingly, comparative microarray analysis can reveal those genes preferentially expressed in NPCs. Genes identified by such methods include SEQ ID NO.s 1-651, listed herein. These genes may be preferentially expressed in NPCs, and as such, are implicated in neurogenesis (e.g., NPC proliferation, differentiation and/or survival).

Manipulating Candidate Gene Expression in vivo

[0083] The established role of the local environment and non-cell autonomous factors in regulating neurogenesis (Peunova et al., J. Neurosci 2001, 21(22): 8809-8818; Kreigstein et al., 149-84, Cheng et al., Nat Neurosci 2009, 12(4): 399-408; Javaherian et al., Cereb Cortex 2009, 19 Supp 1: i70-77; Suh et al., Ann Rev Cell Dev Biol 2009; 25: 253-75) accentuates the importance of experimental systems, such as Xenopus, in which direct assessment of proliferative activity can be made in the intact animal to identify endogenous cellular and molecular mechanisms regulating neurogenesis.

[0084] The use of pharmaceutical agents to modulate gene expression in NPCs in the CNS (e.g., optic tectum) of X. laevis evidences that a gene of interest is implicated in proliferation of NPCs. For example, morpholinos can be designed based on a known gene sequence and effectively silence downstream expressed products of the gene of interest (e.g., RNA, protein). Accordingly, identification of genes that regulate NPC proliferation provides known targets for use in screening pharmaceutical agents that can modulate neurogenesis and NPC proliferation.

### Methods of Screening and Evaluating Modulators of Neurogenesis

### Pharmaceutical Agents

[0085] Pharmaceutical agents (drugs), as used herein, include compounds with pharmacological activity and include inorganic compounds, ionic materials, organic compounds, organic ligands, including cofactors, saccharides, recombinant and synthetic peptides, proteins, peptoids, nucleic acid sequences, including genes, nucleic acid products. Pharmaceutical agents can be individually screened. Alternatively, more than one pharamaceutical agent can be tested simultaneously for the ability to modulate neuroactivity or expression of a gene involved in neurogenesis. Where a mixture of pharmaceutical agents is tested, the pharmaceutical agents selected by the methods described can be separated (as appropriate) and identified by suitable methods (e.g., chromatography, sequencing, PCR, etc.

[0086] Large combinatorial libraries of pharmaceutical agents (e.g., organic compounds, recombinant or synthetic peptides, peptoids, nucleic acids) produced by combinatorial chemical synthesis or other methods can be tested (see e.g., Zuckerman, R. N. et al., J. Med. Chem., 37: 2678-2685 (1994) and references cited therein; see also, Ohlmeyer, M. H. J. et al., Proc. Nat. Acad. Sci. USA, 90:10922-10926 (1993) and DeWitt, S. H. et al., Proc. Natl. Acad. Sci. USA, 90:6909-6913 (1993), relating to tagged compounds; Rutter, W. J. et al., U.S. Pat. No. 5,010,175; Huebner, V. D. et al., U.S. Pat. No. 5,182,366; and Geysen, H. M., U.S. Pat. No. 4,833,092), the relevant portions of each of which are incorporated herein by reference. Where pharmaceutical agents selected from a combinatorial library carry unique tags, identification of individual pharmaceutical agents by chromatographic methods is possible. Chemical libraries, microbial broths and phage display libraries can also be tested (screened) for the presence of one or more pharmaceutical agent(s) which are capable of modulating neuroactivity or expression of one or more genes involved in neurogenesis in accordance with the methods described herein.

[0087] The methods disclosed herein can allow for screening or identification of compounds exhibiting a selected property (e.g., modulating neural progenitor cell proliferation, modulating target gene expression, etc. . . . ). The methods disclosed herein can also be used to evaluate or characterize structure and function of a neuroactive pharmaceutical agent. For example, such methods allow assessment of activity (e.g., in terms of specificity, efficacy, etc. and/or to modulate the activity, by assaying or screening derivatives of said candidate compounds and comparing the activity of such derivatives to a parent unmodified modulator. For example, a chemical entity may be modified structurally by homologation with additional atoms, functional groups and/or substituents, or via substitution of atoms or groups, as will be appreciated by those skilled in the art.

[0088] Accordingly, the present disclosure provides methods and compositions for screening, identifying, characterizing, and modifying neuroactive compounds, for example, modulators or compounds that are active on or modulate neuronal cell function(s) and to identify and/or characterize and/or improve compounds which may be active on or modulate neurons. Such modulators or compounds may be useful for treating disorders of the nervous system wherein neural progenitor cell or neural cell function and/or behavior (e.g., proliferation and differentiation) may be implicated. Thus, in certain embodiments, the present methods may be employed to identify and/or characterize and/or improve compounds which able to modulate differentiation of neural progenitor cells (NPCs) into neurons.

[0089] Neuroactive pharmaceutical agents, compounds or modulators as described herein may also include any compound having the ability to alter (e.g., restore or correct) one or several functions of a cell (specifically a neuron or neural progenitor). For example, the compound of modulator may be capable of altering at least one metabolic pathway or biological or functional property of a cell (neuron) and to identify and/or characterize and/or improve compounds which are active on neurons and specifically able to modulate the differentiation of neural progenitor cells (NPCs) into neurons. As an example, a biologically active compound of this invention is a compound, which is capable of restoring a normal phenotype to an injured neuron or of at least partially inhibiting the deleterious effect of an injury on a neuron. In specific embodiments, the active compound may be selected for its capacity to repress or to activate a cellular mechanism, for its capacity to stimulate or inhibit a metabolic pathway, to restore a biological property, to prevent cell death, etc.

[0090] Pharmaceutical agents suitable for in vivo analyses may include, for example, morpholinos for knockdown of GOIs, enabling analysis of the gene's function in neurogenesis. Other pharmaceutical agents may include shRNA constructs. shRNA-mediated knockdown offers an independent method for knockdown compared to MOs and permits cell-type specific manipulation of protein expression. Methods have been developed to enhance shRNA-mediated knockdown in Xenopus neurons, and plasmid cassettes are available to streamline the generation of many shRNA constructs. Accordingly, shRNA constructs against GOIs can tested for specific knockdown of GOI expression (Chen et al., Front Neurosci 2009, 3: 63) and subsequently tested, for effects on NPC proliferation, for example. Of course, the methods or protocols as described herein may be employed for screening (or identifying, characterizing or improving) compounds that are active on any other attribute of neurogenesis, such as cell survival, NPC differentiation into neurons or glia, and the migration and assembly of cells within a brain region or neural circuit.

[0091] Methods and protocols as described herein may be employed for screening (or identifying, characterizing or improving) compounds that are active on neuronal survival or development, and which may specifically modulate the differentiation of NPCs into neurons.

### Pharmaceutical Compositions

[0092] In another aspect, the present invention provides pharmaceutical compositions comprising a pharmaceutical agent, modulator or compound as described identified by the methods of the present invention. Such pharmaceutical compositions may comprise pharmaceutical agents as described herein that can, for example, modulate neurogenesis or neuronal cell function(s), modulate NPC differentiation and/or proliferation, or may be active on or modulate neurons, and may be useful for treating disorders of the nervous system wherein neural progenitor cell or neural cell function and/or behavior (e.g., proliferation, differentiation, etc. . . . ) may be implicated.

[0093] Pharmaceutical agents as described herein can be formulated as pharmaceutical compositions and administered to, for example, a mammalian host such as a human patient in a variety of forms adapted to the chosen route of administration, e.g., orally or parenterally, by intravenous, intramuscular, topical or subcutaneous routes, and may comprise one or more pharmaceutically acceptable excipients.

### Cell-Based Assays

[0094] The methods of the present invention further comprise contacting isolated cells (e.g., neural progenitor cells) or suitable cultured cell lines with one or more candidate compounds or modulators. The cells may be contacted for various periods of time, depending on their effect, concentration, the cell population, and/or the evaluation technique. In a specific embodiment, the cells may be exposed to candidate compound(s), for example, in the range from about 1 nM to about 1 mM. It should be understood that other concentrations may be tested without deviating from the instant application. Furthermore, each compound may be tested, in parallel, at several concentrations. Furthermore, if necessary, different adjuvants and/or vectors and/or products helping the compounds to penetrate the cells may be added, including liposomes, cationic lipids or polymers, penetratin, Tat PDT, peptides from adenoviruses (e.g., penton or fiber) or other viruses, etc. Contacting can be performed in any appropriate support or device, such as incubation chambers for live Xenopus tadpole preparations.

[0095] Determining the profile of the candidate compounds can be performed according to several methods. In particular, different end points may be measured, in order to assess the neuroactivity of the compounds, such as: cell number, survival, expression of antigens, transcription of specific genes, and morphological changes, e.g., size, neurite growth, etc.

[0096] In a specific embodiment, the neuroactivity of the candidate compounds may be determined by comparison with control neuronal cell populations, in the absence of any compound and/or treated with reference compounds. Determining the status of the neurons can be performed by evaluating different physical measurements, for example, optical properties, fluorescence at various wavelengths, luminescence etc. Different instruments may be used, including automated microscopes fitted with lamps or lasers, etc. Other techniques include light detection through a refrigerated CCD camera. The signals measured may be treated according to known techniques, using for instance software including pixel histogram, cluster analysis and morphology analysis.

[0097] The present invention also relates to the use of any compound (or derivatives thereof) identified, selected, profiled or characterized by the methods of the present invention as, for example (i) targets for experimental research and/or (ii) manufacture of pharmaceutical compositions as modulators and specifically for treating neurological disorders.

[0098] In some embodiments, cell differentiation modes can be modulated by contacting the cells with a modulating agent. In other embodiments, cell differentiation modes can be modulated by introducing a modulating agent into the cells of interest by, e.g., electroporation, or any other suitable technique for introducing the modulating agent into the cells.

[0099] In specific embodiments, the pharmaceutical agent may increase the number or proportion of cells that divide in a proliferating mode relative to other division modes. In other embodiments, the pharmaceutical agent may decrease the number or proportion of cells which divide in a proliferating mode. In other embodiments, the pharmaceutical agent may increase the number or proportion of cells which divide in a mixed mode. Alternatively, the pharmaceutical agent may decrease the number or proportion of cells which divide in a mixed mode. In additional embodiments, the pharmaceutical agent may increase the number or proportion of cells which divide in a differentiating mode. Alternatively, the pharmaceutical agent may decrease the number or proportion of cells which divide in a differentiating mode. Combinations of pharmaceutical agents may also be employed to achieve a desired effect on NPC proliferation and differentiation.

[0100] The pharmaceutical agents of the present invention may be selected such that it modulates a known gene target implicated in the regulation of NPC proliferation and differentiation. Accordingly, a pharmaceutical agent (e.g., a morpholino, siRNA, etc.) may be constructed or selected to, for example, inhibit or upregulate translation of a target gene known to have a regulatory role in NPC proliferation and differentiation. Contacting the target cell(s) with or introducing such a pharmaceutical agent into the target cell(s) can thus effect modulation of NPC behavior.

In vivo Assays

[0101] The presently disclosed methods further comprise contacting isolated cells (e.g., neural progenitor cells) or suitable cultured cell lines with one or more candidate compounds or modulators. The cells may be contacted for various periods of time, depending on their effect, concentration, the cell population, and/or the evaluation technique. Generally, the cells are exposed to candidate compound(s) in the range from 1 nM to 1 mM. It should be understood that other concentrations may be tested without deviating from the instant application. Furthermore, each compound may be tested, in parallel, at several concentrations. Furthermore, if necessary, different adjuvants and/or vectors and/or products helping the compounds to penetrate the cells may be added, including liposomes, cationic lipids or polymers, penetratin, Tat PDT, peptides from adenoviruses (e.g., penton or fiber) or other viruses, etc.

[0102] Determining the profile of the candidate compounds can be performed according to several methods. In particular, different end points may be measured, in order to assess the neuro-activity of the compounds, such as: cell number, survival, expression of antigens, transcription of specific genes, and morphological changes, e.g., size, neurite growth, etc.

[0103] Preferably, the neuro-activity of the candidate compounds is determined by comparison with control neuronal cell populations, in the absence of any compound and/or treated with reference compounds. Determining the status of the neurons can be performed by evaluating different physical measurements, optical properties, fluorescence at various wavelengths, luminescence etc. Different instruments may be used, including automated microscopes fitted with lamps or lasers, etc. Other techniques include light detection through a refrigerated CCD camera. The signals measured may be treated according to known techniques, using for instance software including pixel histogram, cluster analysis and morphology analysis.

[0104] The invention also encompasses the use of any compound (or derivatives thereof) identified, selected, profiled or characterized by the above disclosed methods, (i) as targets for experimental research or (ii) for the manufacture of pharmaceutical compositions for treating neurological disorders.

[0105] In some embodiments, cell differentiation modes can be modulated by contacting the cells with a modulating agent. In other embodiments, cell differentiation modes can be modulated by introducing a modulating agent into the cells of interest by, e.g., electroporation, or any other suitable technique for introducing the modulating agent into the cells.

[0106] In certain embodiments, the pharmaceutical agent may increase the number or proportion of cells which divide in a proliferating mode relative to other division modes. In other embodiments, the pharmaceutical agent may decrease the number or proportion of cells which divide in a proliferating mode. In still other embodiments, the pharmaceutical agent may increase the number or proportion of cells which divide in a mixed mode. Alternatively, the pharmaceutical agent may decrease the number or proportion of cells which divide in a mixed mode. In additional embodiments, the pharmaceutical agent may increase the number or proportion of cells which divide in a differentiating mode. Alternatively, the pharmaceutical agent may decrease the number or proportion of cells which divide in a differentiating mode. Combinations of pharmaceutical agents may also be employed to achieve a desired effect on NPC proliferation and differentiation.

[0107] The pharmaceutical agent may be selected such that it modulates a known gene target implicated in the regulation of NPC proliferation and differentiation. Accordingly, a pharmaceutical agent (e.g., a morpholino, siRNA, etc.) may be constructed or selected to, e.g., inhibit or upregulate translation of a target gene known to have a regulatory role in NPC proliferation and differentiation. Contacting the target cell(s) with or introducing such a pharmaceutical agent into the target cell(s) can thus effect modulation of NPC behavior.

In vivo Assays

[0108] Analysis of genomic data generated by microarray and/or other genomic analysis techniques may be used to prioritize genes that can regulate proliferation and differentiation of NPCs in the tadpole CNS. Antisense morpholino oligonucleotides (MOs) (Eisen et al., Development 2008, 135(10): 1735-43) can thus be generated against genes of interest (GOI) and each GOI screened by morpholino-mediated knockdown for an effect of cell proliferation using imaging to assess BrdU incorporation in the CNS. For GOI that increase or decrease cell proliferation, several in vivo assays may be employed to test their function in controlling neurogenesis in the optic tectum (Nedivi et al, Science 1998, 281: 1863-1866; Ewald et al, J Neurosci 2008, 28(4): 850-61; Cantallopset al., Nat. Neurosci. 2000, 3: 498-503; Javaherian et al., Neuron, 2009 (in press); Van Aelst et al., Curr Opin Neurobiol 2004, 14(3): 297-304; Van Keuren-Jensen et al., Dev Neurobiol 2008, 68(11): 1315-24; Wu et al., Science 1998, 279: 222-226; Cline et al., J Physiol 2008, 586(6): 1509-17).

[0109] A first exemplary assay combines BrdU incorporation with immunolabeling for neuronal markers. The advantages of BrdU labeling are that the method is non-invasive and can be used as a relatively high-throughput screen of the effects of GOI knockdown or overexpression on cell proliferation. Combining BrdU and neuronal labeling allows quantitative evaluation of GOI on neurogenesis. Tadpoles can be exposed to a rearing solution containing BrdU. This method efficiently labels proliferative cells and allows greater control over BrdU exposure time. It has been shown that access of BrdU does not change over the developmental periods studied and that BrdU incorporation does not occur in response to DNA damage. BrdU exposures are typically performed at the same time of day for all animals to control for potential circadian effects on proliferation. After BrdU exposure, animals are either fixed immediately, or reared for 2-3 days before fixing and processing animals for BrdU immunolabeling.

[0110] Animals are then terminally anesthetized, microwave fixed (Paupard et al., J. Histochem. Cytochem. 2001, 49(8): 949-956) and brains are processed for antibody labeling in wholemount or vibratome sections (Peunova et al., 8809-8818) with primary antibodies (mouse anti-BrdU, BD Bioscience; rabbit anti NeuroD; Abcam and Alexafluor secondary antibodies (Molecular Probes)).

[0111] A second exemplary assay uses in vivo time-lapse imaging of cells labeled with suitable reporters or markers, such as Sox2.mFGF4::FP-labeled NPCs. The advantages of time-lapse in vivo imaging experiments are that longitudinal studies allow direct observation of cell proliferation, cell fate and structural dynamics underlying these events. How GOI overexpression/knockdown alters neurogenesis in vivo is quantified, and cell division rates and fate of progeny can be determined.

[0112] Proliferative cells in ventricular sections, whole mount fixed brain preparations and in vivo FP-labeled samples can be imaged using a spinning disk confocal attachment mounted on a microscope equipped with laser lines and dichroic mirrors and filters to resolve UV to far red fluorophores. Signals are captured on a sensitive, high signal to noise EMCCD camera. Images are acquired using appropriate image acquisition software. In double-label experiments, images are acquired sequentially to eliminate bleed-through. Controls with single fluorophore labelings are done to ensure absence of bleed-through.

[0113] For in vivo image time-lapse imaging, anesthetized tadpoles are placed in a custom imaging chamber. Complete confocal stacks at 1 μm z-step are acquired using proper laser/filter settings for the fluorophores. For fixed tissue whole mounts and sections, complete z-stacks (0.5 μm z-interval) are acquired of the tectal lobes.

[0114] For analysis of time-lapse data, radial glia and neurons are distinguished according to morphological criteria based on the 3 dimensional structure of the cells. The numbers and sequence of symmetric, proliferative divisions; asymmetric, neurogenic divisions; terminal symmetric neurogenic divisions, and the differentiation state of each cell in the lineage over the timecourse of the experiment are determined. Time-lapse imaging of the individual NPCs allows identification of the fate of cells over the course of the imaging experiment, including the assessment of morphological changes in dividing and differentiating cells.

[0115] Thus, in certain embodiments the present methods are useful for screening (or identifying, characterizing or improving) pharmaceutical agents that alter the differentiation of neural progenitor cells (NPCs) into neurons in vivo, more particularly in an intact brain. An advantage of the present methods is that such methods may employ neural cell populations in vivo, such as those in the intact visual system of a Xenopus tadpole. Accordingly, the use of in vivo neural cell populations allows a predictive and reliable assessment of the biological activity of a compound or modulator. The NPCs and neurons employed may be of various origins, including mammalian origin (e.g., rodents, humans, primates, etc. . . . ) as well as amphibians such as Xenopus laevis.

[0116] The activity of a pharmaceutical agent in vivo can be determined, for example, as described herein with respect to screening of genes related to neurogenesis. For example, since Xenopus tadpoles are amenable to in vivo time-lapse imaging, neural progenitor cells and their progeny can be imaged in the intact animal. Accordingly, after contacting NPC cells in vivo with a candidate pharmaceutical agent, the rate of proliferation in a test animal population relative to a control animal population may be measured (e.g., visualized), and the activity of a candidate modulating determined by the relative rates of NPC proliferation in animals treated or contacted with a candidate pharmaceutical agent relative to a control population. A pharmaceutical agent that modifies NPC proliferation rates (e.g., enhances or decreases) is thus identified as a modulator of neurogenesis and neural cell proliferation.

[0117] Conditions described herein with respect to in vitro methods for screening of pharmaceutical agents as modulators of neurogenesis and gene screening methods in vivo (e.g., concentration of the pharmaceutical agent, readout, etc.) may also be employed here. For example, an NPC cell population in an intact animal CNS region (e.g., optic tectum) may be transfected (e.g., by electroporation) so its expresses a fluorescent protein (FP). FP-expressing cells in the intact animal can be imaged at time t=0, then imaged again after a predetermined time period (e.g., 24 h, 48 h, 96 hr, etc.), and may be imaged at intervals during the predetermined time period (e.g., at 12 hr, 24 hr, 36 hr, etc.). The change in relative type and number of cells (e.g., NPCs and differentiated neurons) over the predetermined time period each 24 h interval can be determined by classifying the cells according to their morphologies. Changes in morphology may be characterized as fractions of NPCs and glial cells in a test population relative to a control population. Differences between the cells in the test animal population and the control animal population may indicate that the candidate agent is a modulator of NPC proliferation.

[0118] In a specific embodiment, a screen of GOI effects on CNS cell proliferation can be perfomed using an imaging assay to assess BrdU incorporation in X. laevis tadpoles whose brains were electroporated with morpholinos to GOIs. One to two days later, proliferative cells may be labeled by exposure to BrdU for 2 hr before sacrifice. Brains can then be processed to detect BrdU in wholemount and imaged by collecting a complete z series of confocal images through the brain. Such imaging of wholemount brains provides an excellent method to quantify levels of cell proliferation.

### EXAMPLES

[0119] The present disclosure will be further illustrated by the following non-limiting Examples. The following Examples are understood to be exemplary only, and should not be construed as limiting the scope of the invention as defined by the appended claims.

### 1. Visual Stimulus and NPC Proliferation

### Overview

[0120] Neural progenitor cell (NPC) proliferation and differentiation were assayed in the visual system of the intact Xenopus tadpole central nervous system. This experimental system allows manipulation of neural activity by exposing animals to visual system stimulation or depriving animals of visual system stimulation. The results show that the rate of proliferation of NPCs is increased in animals deprived of visual stimulation compared to animals reared under conditions of 12 h light/12 h dark. Animals which are deprived of visual stimulation for 24 h followed by a 24 h period of visual stimulation show an increased rate of proliferation during the first 24 h in the absence of visual experience, followed by differentiation of the majority of new generated cells (FIG. 6). These data show that manipulating neural activity control both proliferation rate and differentiation: decreased neural activity increases proliferation and increased neural activity triggers the differentiation of progenitors into neurons.

### Methods

[0121] NPCs were transfected in intact Xenopus tadpoles so they express fluorescent protein (FP). FP-expressing cells in intact animals were imaged using confocal microscopy. After imaging the animals were then placed in light-tight chamber so they received no visual stimulation over the next 24 h. FP-expressing cells were imaged again and the animals were placed in a chamber where they received visual stimulation for 24 h. Animals were imaged for a third time. The change in cell numbers over each 24 h interval and the identity of the cells as radial glia (NPCs) or neurons was determined according to their morphologies. Data are expressed as the change in cell number per 24 h and as the fraction of cells with NPC or neuronal morphologies.

### Results

[0122] In the absence of visual experience, cell numbers increase +19.9±5.8% over a 24 hour period (N=12 tecta analyzed). After exposing the animals to the visual stimulus for 24 hours, we find a significant 6.3±5.4% drop in cell numbers (Wilcoxon singed-rank test, p=0.01). This negative rate indicates that the cells have left the proliferative cycle because the fluorescence marker used to detect the cells is driven by a promoter that is expressed only during proliferation. A separate set of animals that were not exposed to the visual experience showed no significant differences in the proliferation rate between the two 24 hour periods (N=7 tecta analyzed, p=0.4).

[0123] There was a steady rate neurogenesis in the brains of animals which were not exposed to the visual stimulus. In the absence of visual stimulation, the rate of new neurons increased 32.9±11.3% over the first 24 hour interval which was not significant from the 30.1±9.4% increase measured over the second 24 hour interval (N=7 tecta, Wilcoxon signed rank test p=0.73). In contrast, the neurogenesis rate of animals that were exposed to the visual stimulus during the last 24 hour interval fell significantly from 79.4±22.9% in the first 24 hour interval to 18.0±9.4% during the second 24 hour interval (N=12 tecta, p=0.05).

[0124] In the absence of the 24 hour visual experience, the rate that cells lose their glial appearance shows a 17.1±9.7% drop during the first 24 hour period and a 44.9±10.6% decrease during the last 24 hour interval (N=7 tecta, p=0.18). The rate that cells from the animals with 24 hours of visual deprivation followed by 24 hour exposure to visual stimulation lose their glial appearance significantly increases after exposure to the visual stimulus (17.1±9.7% loss before and 56.0±10.0% loss afterward, p=0.04).

[0125] Together these results are consistent with visual experience disrupting cell proliferation and increasing the rate with which glial precursors differentiate into neurons.

2. Modulating Agents with and without Visual Experience and NPC Proliferation

### Background and Methods

### NPC Detection

[0126] These experiments took advantage of a cell-type specific, fluorescent reporter system that drives protein expression in dividing cells (see FIG. 3). The reporter consisted of 6 repeats of upstream regulatory elements of fibroblast growth factor 4 (FGF4). Endogenous sox2/oct3 transcription factors bind to the FGF4 regulatory elements and drive the expression of Gal4 which in turn drives the UAS-fluorescent protein. FGF4, sox2 and oct3, are each expressed in proliferating cells, and relying on endogenous sox2/oct3 transcription factors to drive Gal4 promoted specificity of reporter expression within proliferating cells. The UAS-fluorescent protein was expressed as a separate construct; this reporter added modularity and specificity to this reporter system.

[0127] Tectal cells expressing the above-described fluorescent reporter were harvested from tadpoles with varying visual experience as well as from tadpoles that had expressed the construct for different amounts of time. RNA from these cells was then processed and microarray comparisons made. Identified genes of interest selected for further analysis are summarized in Table 1 below:

TABLE 1
Genes of Interest Identified via Microarray Analysis

| Accession No. | Actual name | Description |
|---|---|---|
| NM 001092639.1 | MGC82106 | A putative isoform of Elk4. |
| | ELK4, ETS-domain protein (SRF | |
| | accessory protein 1) (elk4-b) | |
| BC170068.1 | Polysomal ribonuclease 1 | |
| BC170070.1 | Polysomal ribonuclease 1 | |
| BC169356.1 | cAMP-dependent protein | |
| | kinase catalytic subunit alpha | |
| | Cytoplasmic polyadenylation | RNA-binding protein that stimulates |
| | element binding protein 1 | polyadenylation and translation in |
| | | germ cells and neurons |
| | Candidate plasticity gene 15 | Involved in cell survival and is |
| | | regulated by activity. |
| BC106400.1 | Deiodinase, iodothyronine, type | Removes iodine from the active form |
| | III | of thyroid hormone (T3) to inactivate |
| | | it. |
| NM 001087027.1 | Xenopus laevis ephrin-A3 | |
| | (efna3) (ligand) | |
| NM 001085854.1 | ELK4, ETS-domain protein (SRF | A transcription factor and member of |
| | accessory protein 1) (elk4-a) | the ternary complex factors. Regulated |
| | (sap1) | by extracellular regulated kinases as |
| | | part of the MAPK pathway of growth |
| | | factor signaling. |
| NM 001090601.1 | Ephrin-B1 | A type I membrane protein and a |
| | EPH receptor B1 | ligand of Eph-related receptor tyrosine |
| | | kinases. |
| NM 001085687.1 | Fragile X mental retardation | RNA binding protein whose loss results |
| | protein 1 | in Fragile X mental retardation |
| NM 001088317.1 | Fragile X mental retardation, | Known to interact with fmr1A |
| | autosomal homologue gene | |
| NM 001088783.1 | Glutathione S-transferase pi 1 | Part of the family of proteins that |
| | | catalyze the conjugation of |
| | | hydrophobic and electrophilic |
| | | compounds with reduced glutathione. |
| NM 001087017.1 | Histone deacetylase 6 | Responsible for the deacetylation of |
| | | histones and epigenetic changes in |
| | | chromosomes. |
| NM 001086595.1 | Heat shock protein | Member of the heat-shock protein-70 |
| | (glucose-regulated protein 78 | (HSP70) family regulated by glucose |
| | (GRP78) | levels. |
| NM 001086503.1 | Matrix metalloproteinase 9 | A TypeIV collagenase involved in the |
| | | breakdown of extracellular matrix. |
| BC169513.1 | Wingless-type MMTV | The Wnt genes are ligands that bind |
| | integration site family, member | members of the frizzled family of |
| | 7B | seven transmembrane receptors. |

[0128] Comparisons were made between tadpoles of different ages (greater population of proliferating cells versus greater population of terminally differentiated cells) and tadpoles with different visual experience, which may also bias the relative levels of proliferations versus terminal differentiation. Genes that showed significant changes in their expression in multiple microarray comparisons were prioritized.

[0129] The above-described reporter was employed to drive the fluorescent protein Kaede in the proliferating cells of the optic tectum of tadpoles. The fluorescent emission spectrum of Kaede can be photoconverted from green to red after exposure to a UV light or 405 nm laser source, which added temporal control to the experiments. 24-36 hours after the tadpoles were transfected with the reporter, all the Kaede-expressing cells were photoconverted to the red form of the protein. Based on published data using similar methods (Caron et al., Development 2008, 135:3259-3269), newly produced progeny inherit the red Kaede during cytokinesis, but continue to synthesize new green Kaede protein. For example, Caron et al. (ibid.) identified newly generated cells by the relative levels of green to red.

[0130] Cells of the optic tectum were transfected with the proliferation reporter by electroporation, a well-established method that reliably results in multiple labeled cells in the tissue (Haas et al., Differentiation 2002, 70: 148-154). The Gal4 driver and UAS-kaede plasmids (0.5 μg/μl) were injected into the ventricle of the optic tectum and then voltage pulses were applied across the tissue to drive the plasmids into the cells of the tectum. These plasmid constructs were co-electroporated with antisense morpholino oligonucleotides designed to inhibit the translation of the candidate genes (Eisen et al., Development 2008, 135: 1735-1743). The morpholinos were electroporated at 0.1 mM and visualized by a lissamine fluorescent tag. To prevent conversion of Kaede from UV wavelength from ambient light, the animals were kept in the dark. 24-36 hours later, the tadpoles were anesthetized and a complete z-stack through the optic tectum of each animal was collected on each day for 3 consecutive days. After the first imaging of the tectum, all animals were returned to the dark for the 24 hour period until the second imaging. At that time, some animals were exposed to an enhanced visual environment which consisted of a chamber with an array of LED lights (emitting at 567 nm, beyond the wavelength for converting the Kaede protein) which flashed for 1 sec. at 0.2 Hz. This visual stimulus has been shown to enhance the synaptic drive onto the tectal neurons and results in significant changes in synaptic plasticity (Sin et al., Nature 2002, 419: 475-480).

[0131] Data Acquisition and Analysis

[0132] Acquisition settings used on the first day were chosen to protect against pixel values reaching saturation by the third day. The selected settings were used throughout the experiment. Volocity software (Improvision, Perkin Elmer) which uses the 3D information from the acquired z-stacks was used to identify and select cell bodies of the labeled cells based on the standard deviation of the intensity and size of the objects. The identified objects were then experimenter verified and the cell type (glia, neuron, or undefined) was assigned based on cell morphology. From each tectal lobe typically between 15 and 45 cells were transfected. Percent proliferation was calculated as the change in cell numbers per 24 hour period. These measurements are reported as mean±s.e.m.

[0133] The analysis of proliferation in control animals, animals with cell proliferation blockers, and animals which received the 24 hour enhanced visual stimulation are reported. Results of experiments in which 2 candidates identified from the microarrays (Dio3 and GstPi) were knocked down with antisense morpholinos are also reported. In addition, results from experiments to determine visual experience affects proliferation in the presence of Dio3 morpholino knockdown are reported. The experimental conditions employed are summarized in Table 2 below:

TABLE 2
Morpholino Knockdown Experiment Conditions

| | | Visual | N |
|---|---|---|---|
| Morpholino | Description | stimulus | (tectal lobes) |
| — | Proliferation Reporter + DMSO | No | 8 |
| — | Proliferation Reporter + aphidicolin and hydroxyurea | No | 10 |
| — | Proliferation Reporter only | No | 12 |
| — | Proliferation Reporter only | Yes | 12 |
| Dio3 | Deiodinase, iodothyrine, type III | No | 5 |
| Dio3 | Deiodinase, iodothyrine, type III | Yes | 4 |
| Gst Pi | Glutathione S-transferase Pi | No | 6 |
| HDAC6 | Histone deacetylase 6 | No | — |
| Wnt7b | Wingless-type MMTV (murine mammary tumor virus) | No | — |
| | integration site family, 7b | | |
| HSPA5 | Heat shock protein 70 | No | — |
| MMP9 | Matrix metalloproteinase, a type IV collagenase | No | — |
| FXR1 | Fragile X mental retardation, autosomal homologue | No | — |
| Fmr1A | Fragile X mental retardation protein 1 | No | — |

### Results and Discussion

[0134] Expression of the Sox2 reporter construct demonstrated that radial glia are the major neural progenitor cell in the Xenopus optic tectum (FIG. 4). Neurons did not continue to express green Kaede after differentiation since differentiated cells no longer produce sox2/oct3 to drive the gal4-UAS-Kaede consturct. The majority of NPC divisions were found to be terminal divisions.

[0135] Cell Division Blockers

[0136] Aphidicolin (150 uM) and hydroxyurea (20 mM in 2% DMSO) were applied to cells to block cell divisions, and the proliferation rates of those cells compared with control animals receiving only DMSO. This treatment disrupts proliferation in Xenopus (Harris et al., Neuron 1991, 6: 499-515). In control animals exposed to DMSO only, an average increase of 16.4±4.2% in cell number over 24 hours (N=8 tectal lobes) was observed. Aphidicolin and hydroxyurea blocked cell proliferation (increase in cell numbers: 0.41±6.28% (N=10, p=0.1, Mann-Whitney; see FIG. 5).

[0137] Visual Experience-Dependent Control of NPC Fate

[0138] In the absence of visual experience, cell numbers increased 19.9±5.8% over a 24 hour period (N=12 tectal lobes). After exposing the animals to the visual stimulus for 24 hours a significant 6.3±5.4% decrease in cell numbers was found (p=0.01). This negative rate shows that the cells may have left the proliferative cycle and are no longer detectable due to dilution of the red Kaede reporter in the increasingly growing dendritic arbor. The Kaede reporter is expressed only during proliferation and accordingly, terminally differentiated cells will exhibit only that reporter produced while in proliferative mode. Control animals which did not receive the 24 hour period of visual stimulation showed no significant differences in the proliferation rate between the two 24 hour periods (10.3±7.2% and −0.6±3.5%; N=12 tectal lobes analyzed, p=0.23; FIG. 6A).

[0139] To test whether exposure to visual experience affects the fate of cells in the tectum, the fraction of neurons in the labeled population after 24 h with or without visual stimulation was compared. The proportion of cells with neuronal morphology was greater in animals that were exposed to visual stimulus as compared to control animals (75.7±4.1% versus 60.1±4.8%, p=0.02, Mann-Whitney; FIG. 6B), showing that visual experience promotes differentiation of NPC progeny.

[0140] Dio3-Morpholino Expression and Neurogenesis

[0141] Deiodinase iodothyronine type III is the enzyme in the thyroid hormone pathway which removes iodine from the active form of thyroid hormone (T3), effectively inactivating it. A microarray analysis suggested that Dio3 expression was increased in active progenitor cells. T3 levels in X. laevis are low before metamorphic stages, but the presence of T3 receptors has been detected in NPCs, suggesting that relative changes in T3 levels may affect proliferation. Increased proliferation correlates with increased thyroid hormone and receptor activation in X. laevis tadpoles at metamorphic stages (Denver et al., Dev Biol 2009, 326: 155-168). Therefore, a knockdown of Dio3 with morpholino expression should increase T3 levels and accordingly increase proliferation.

[0142] Animals transfected with morpholinos against Dio3 (Dio3-MO) exhibited increased cell numbers: 11.4±17.3% in the first 24 hour period and 33.9±22.2% over the second 24 h period (N=4, FIG. 7). In contrast, control animals show the largest increase in proliferation the first 24 hour period, then little proliferation over the subsequent 24 hour period. Unusual clusters of cells that appear to be clones were found within the tecta of animals transfected with Dio3-MO, consistent with unusual patterns of proliferation without the normal time for migration.

[0143] Some animals expressing Dio3-MO were also exposed to visual stimulus during the second 24 h period (FIG. 7). Visual experience was found to decrease rates of proliferation in animals transfected with Dio3-MO (N=5), however this difference was not considered significant due to the large variation in proliferation rates.

[0144] Knockdown of GSTpi Promotes Neuronal Differentiation

[0145] Glutathione S-transferase Pi 1 (GSTP1) is a member of the Glutathione S-transferase family of proteins, which plays an important role in detoxification by catalyzing the conjugation of many hydrophobic and electrophilic compounds with reduced glutathione. GST-Pi 1 is thought to play a role in the susceptibility to cancers. GST-Pi 1 was observed to be up-regulated in neural precursor cells and therefore a GST-Pi knockdown is predicted to decrease proliferation rates.

[0146] A striking result was observed in the tecta of tadpoles expressing morpholinos against GSTpi. The number of neurons even by the first day was significantly greater than that observed in control animals (FIG. 8). A significantly larger population of tectal cells (72.7±4.7%, N=7 tectal lobes) expressing GSTpi-MO were differentiated into neurons by day 1 in test animals relative to control animals (42.0±4.7%), (p=0.002, Mann-Whitney). By day 2, 86.4±3.7% of the cells have differentiated into neurons in the test animals compared to 49.2±5.7% within the control population (p=0.001). This proportion of neurons may represent a maximum as the number of neurons was not observed to increase in the test animals over the third period (86.8±1.0%), and is significantly larger than the proportion of neurons within the control animals (60.1±16.6%; p=0.004).

[0147] An increase in the total proportion of neurons shows that the neural precursor population decreases with GSTpi-MO expression. The proportion of radial glia decreases over the 3 day period in animals expressing GSTpi-MO, as well as control animals (FIG. 8). Comparing the proportion of cells from brains expressing GSTpi-MO to the control animals showed that by day 1 there were significantly fewer glia (13.3±4.6% and 41.5±4.8%; p=0.005) and these differences continued over the next two days (8.4±2.0% and 17.4±3.5%, p=0.02; 4.8±1.6% and 13.3±4.6%, p=0.02). A small proportion of cells could not be categorized into radial glia or neurons.

[0148] Fragile X Related Genes

[0149] Fmr1A. Fragile X mental retardation protein 1 is an mRNA binding protein that is thought to regulate mRNA trafficking from the nucleus to the cytoplasm and local protein translation within neurons. Microarray data suggested that expression of FMR1 and a protein similar to 82-kD FMRP Interacting Protein, proliferation-inducing gene 1 (AKA nuclear fragile X mental retardation protein interaction protein) were lower in NPCs compared to differentiated neurons. The potential role of FMRP and related proteins in neuronal proliferation is not entirely clear. One study showed that FMR1 increases NPC proliferation and alters differentiation (Castren et al., Proc Natl Acad Sci USA 2005, 102: 17834-17839), while another showed that FMR1 only alters NPC differentiation (Bhattacharyya et al., Stem Cells Dev 2008 17: 107-117). The possible discrepancy between these studies may be due to the fact that each of the studies uses a different source of in vitro cells. An in vivo study may clarify the role of FMR1 and related genes in proliferation of NPCs.

[0150] FXR1. Fragile X mental retardation, autosomal homologue gene interacts with the functionally-similar proteins FMR1 and FXR2. Based on microarray data, knocking down FXR1 may increase proliferation by inhibiting differentiation.

[0151] Morpholinos against FMR1A and FXR1 appeared to decrease NPC proliferation in the tectum. These were qualitative observations.

What is claimed is:

1. A method, comprising:
a) contacting neural progenitor cells in an intact brain region of a first animal with a pharmaceutical agent;
b) exposing said first animal and a second control animal to a visual stimulus; and
c) measuring proliferation rates of said neural progenitor cells in said first animal and of neural progenitor cells in said second animal;
wherein a difference in proliferation rate between said neural progenitor subject cells and said neural progenitor control cells identifies the pharmaceutical agent as one capable of modulating neural proliferation

2. The method of claim 1, wherein said intact brain region comprises the optic tectum.

3. The method of claim 1, wherein said intact brain region is involved in processing one or more of the group selected from olfactory inputs, visual inputs, and mechanosensory inputs, or is involved in mediating behavioral outputs.

4. The method of claim 1, wherein said intact brain region comprises circuits of the telencephalon, midbrain, hindbrain/spinal cord, retina, or olfactory pit.

5. The method of claim 1, wherein said first and second animals are Xenopus laevis.

6. The method of claim 1, wherein measuring comprises counting the number and type of cells in the optic tectum of said first and second animals.

7. The method of claim 1, wherein contacting said neural progenitor cells with pharmaceutical agent comprises electroporating said pharmaceutical agent into said neural progenitor cells.

8. A method, comprising:
a) contacting neural progenitor subject cells with a pharmaceutical agent in an amount effective to modulate expression of one or more genes in said neural progenitor subject cells;
b) measuring proliferation rates of said neural progenitor subject cells and of neural progenitor control cells that have not been contacted with said pharmaceutical agent; and
c) comparing the proliferation rates of said neural progenitor subject cells and said neural progenitor control cells;
wherein a difference in proliferation rate between said neural progenitor subject cells and said neural progenitor control cells identifies the one or more genes as modulators of proliferation of neural progenitor cells.

9. The method of claim 8, wherein said neural progenitor subject cells are in a first animal and said neural progenitor control cells are in a second animal.

10. The method of claim 9, wherein said neural progenitor subject and control cells are in an intact brain region of each of said first and second animals respectively.

11. The method of claim 10, wherein said intact brain region is involved in processing olfactory inputs, visual inputs, or mechanosensory inputs, or is involved in mediating behavioral outputs.

12. The method of claim 10, wherein said intact brain region comprises circuits of the telencephalon, midbrain, hindbrain/spinal cord, retina, or olfactory pit.

13. The method of claim 10, wherein said first and second animals are Xenopus laevis.

14. The method of claim 8, further comprising introducing a reporter construct into said neural progenitor subject cells and said neural progenitor control cells.

15. The method of claim 14, wherein said reporter construct comprises a gene encoding a fluorescent protein.

16. The method of claim 15, wherein the fluorescent protein is specifically expressed in neural progenitor cells.

17. The method of claim 14, wherein introducing comprises transfecting with a plasmid encoding said reporter construct.

18. The method of claim 8, wherein measuring comprises counting the number and type of cells before and after at least one predetermined time period.

19. The method of claim 8, wherein contacting said neural progenitor subject cells with a pharmaceutical agent comprises electroporating said pharmaceutical agent into said neural progenitor subject cells.

20. The method of claim 9, further comprising exposing said first and second animals to a visual stimulus.

21. The method of claim 8, wherein said pharmaceutical agent comprises a chemical compound or an antisense oligonucleotide.

22. The method of claim 21, wherein said antisense oliogonucleotide comprises an siRNA, and shRNA and/or a morpholino.

23. The method of claim 8, wherein said one or more genes are selected from SEQ. ID. NOs. 1-651, or functional truncations, modifications and/or substitutions thereof.

24. A method, comprising:
a) contacting neural progenitor subject cells with a pharmaceutical agent;
b) measuring proliferation rates of said neural progenitor subject cells and of neural progenitor control cells that have not been contacted with said pharmaceutical agent; and
c) comparing the proliferation rates of said neural progenitor subject cells and said neural progenitor control cells;
wherein a difference in proliferation rate between said neural progenitor subject cells and said neural progenitor control cells identifies the pharmaceutical agent as one capable of modulating proliferation.

25. The method of claim 24, wherein said neural progenitor subject cells are in a first animal and said neural progenitor control cells are in a second animal.

26. The method of claim 25, wherein said neural progenitor subject and neural progenitor control cells are in an intact brain region of each of said first and second animals.

27. The method of claim 26, wherein said intact brain region is involved in processing olfactory inputs, visual inputs, or mechanosensory inputs, or is involved in mediating behavioral outputs.

28. The method of claim 26, wherein said intact brain region comprises circuits of the telencephalon, midbrain, hindbrain/spinal cord, retina, or olfactory pit.

29. The method of claim 25, wherein said first and second animals are Xenopus laevis.

30. The method of claim 24, further comprising introducing a reporter construct into said neural progenitor subject cells and said neural progenitor control cells.

31. The method of claim 30, wherein said reporter construct comprises a gene encoding a fluorescent protein.

32. The method of claim 31, wherein the fluorescent protein is specifically expressed in neural progenitor cells.

33. The method of claim 30, wherein introducing comprises transfecting with a plasmid encoding said reporter construct.

34. The method of claim 24, wherein measuring comprises counting the number and type of cells before and after at least one predetermined time period.

35. The method of claim 24, wherein contacting said neural progenitor subject cells with a pharmaceutical agent comprises electroporating said pharmaceutical agent into said neural progenitor subject cells.

36. The method of claim 24, further comprising exposing said first and second animals to a visual stimulus.

37. A method, comprising;
a) administering a pharmaceutical agent to subject cells expressing a target gene selected from the group consisting of SEQ ID NOs. 1-651, or functional truncations, modifications and/or substitutions thereof; and
b) comparing expression of the target gene in the subject cells administered the pharmaceutical agent compared with expression of the target gene in subject cells not contacted with the pharmaceutical agent;
wherein a difference in expression of the target gene in subject cells administered the pharmaceutical agent compared with subject cells not administered the pharmaceutical agent identifies the pharmaceutical agent as a candidate modulator of neural proliferation or differentiation.

38. The method of claim 37, wherein the subject and control cells are neural progenitor cells.

39. The method of claim 37, further comprising evaluating the candidate modulator of neurogenesis in an intact brain region.

40. The method of claim 39, wherein the intact brain region is the optic tectum of Xenopus laevis.

41. A pharmaceutical agent identified by the method of claim 1.

42. A pharmaceutical agent identified by the method of claim 8.

43. A pharmaceutical agent identified by the method of claim 24.

44. A pharmaceutical agent identified by the method of claim 37.

45. A method, comprising administering the pharmaceutical agent of claim 38 to a patient.

46. A method, comprising administering the pharmaceutical agent of claim 39 to a patient.

47. A method, comprising administering the pharmaceutical agent of claim 40 to a patient.

48. A method, comprising administering the pharmaceutical agent of claim 41 to a patient.

49. A pharmaceutical composition comprising the pharmaceutical agent of claim 38.

50. A pharmaceutical composition comprising the pharmaceutical agent of claim 39.

51. A pharmaceutical composition comprising the pharmaceutical agent of claim 40.

52. A pharmaceutical composition comprising the pharmaceutical agent of claim 41.

The application's sequence listing, which the Patent Office published only in electronic form, follows.

SEQUENCE LISTING (651 sequences)

SEQ ID NO: 1 - DNA, 1196 bp, Xenopus laevis
tggaaccaaaatacattttataaggatttagttcactatgggacattagaaatcatattctctcgcagtaaagagaactcatctgaactgagagaagatgtttgtgcacagtctggttcttctgtccatactcattaccgtgaggttctctgctggatgtgataatttttcccttgatcaaaagaaacaaaagatccttggtctgctggcaagttgggaagattatgaatcatgtagtaaaaatggcttttgctcccataacaacaaagagtccagtaaaatgtacaggaactgcagggaaattaaggaattcaacaataatgctgaagatggaatctacacactgagaactggaggtgggatctcctaccagacattctgtgatatgacagctgatggtggaggctggaccttggtggccagtgtccatgagaacaacatgtttggcaagtgcacagttggagaccgatggaccagtcaacagggaaacgatcccaactacccagcaggagatggtaactgggcaaattatgccacgtttggattacctggtggagctaccagtgatgactacaagaatccaggctattatgatatcacttccagtaacttgggattgtggcacgtgcccaacaacacaccattttcccactggaggaataactcacttctaaggtatcggacacagaataacttcttttctgctgaaggtggaaatctcttcaatctctaccagaaatatccactaaagtttggaattggaacttgtccaaaagatcatggacctgctgtgcccattgtgtatgatttgggaaatcctgacctaaccactaaatactactctccaagtggtagacgggagtttactgctggatttgttcacttcagagtgtttaatgcagaaaaagcagcgcttgctctctgtgcaggagtcaaggtgactggctgtaatacagaacatcactgcataggaggaggaggttattttgcagaagggaatcctaaacagtgcggagatttcacaggctttgactgggatggttatgggacacatcaagattggagcaatagcaaagaaattacagaggctgctgtactcctcttttaccgctgatttatactgcaagactgacattaaagggaacattaactgaaaaataaaagttcctttaatttgcaaaaaaaaaaaaaaaaaa

SEQ ID NO: 2 - DNA, 951 bp, Xenopus laevis
atggacagcaactgccgcaaactggtgacaacctgtgtccaactaggagtgcagccctcggcagtggagtgtctcttttctaaggagtctgatatgaagaaggggggtttttctgctgcagatggaaccgaaggaaaccgcaaggaaactggaaaacggtttagccggattcaccaaagtggcagtgataaagacaaaagccaccagagcaagaacgaggacaacagtacagatgatccctccaagaagaagaggcagaggcgacagaggactcacttcaccagtcagcagctgcaggagctggaagcgactttccagagaaatcgttaccccgacatgtccaccagggaggaaatcgcagtgtggaccaatctgacagaggccagagtcagggtttggtttaagaaccgcagggccaagtggagaaagagggagaggaaccaacaaactgagctctgcaaaaacggctttggcccccagttcaatggactgatgcagccatatgatgatatgtaccccagttactcgtacaacaactgggcaaccaagggcctgacttcagcctctctgtccactaagagctttcctttcttcaattctatgaatgtcaacccactgtcctcccagagtatgttctcctcgcccaattccatttcttccatgagcatgtcctctggcatggtcccctctgctgttactggagtgccaggctctggtctaaatagcttgaataacctgaacaatttgagcaacccttccctcaatactgcagtgccaacgtcggcctgcccttatgctcccccaacacctccctatgtctacagagacacatgtaactccagcctggcaagcctgagactcaaagccaagcaacactctagttttggctatgttcaaaacccaggatccaacctcagcgcctgccaatatgcagtggacagacccgtgtga

SEQ ID NO: 3 - DNA, 2446 bp, Xenopus laevis
gcaggctgaaaaaacaggatcatcatatattcaagctcatctttttttttcggacaccgttagtgactgtaaatgtgttggagttgcagttttctgggacactaaaagaagcaatgtggtgaaatcaagttaccatagcttggagaaatattggaatatagataatgggctgtgtgcaatgcaaggataaagaagccactaaactgacagatgagagggataacagtttaactcagagtttaggataccgctatgggacggatcccaccccgcagcattatcccagttttactgtgacgaccattccaaactataacaacttccatgcgactgcagggcagggacttacggtgtttggtggggtgaactcttcatcgcacacaggcaccttgcgtacaaggggaggaacaggagtgacgctttttgtggctctgtatgactatgaagcaagaacagaagatgatttaagttttcaaaaaggagaaaaatttcaaatactcaatagctcggaaggtgattggtgggaagctcgctctttaaccactggaggcactggttacattcccagtaactatgttgcaccggtggattctatacaagcagaggaatggtactttggcaaactgggcaggaaagatgcagaaaggcaattgctctcttttgggaacccaaggggtacttatctaatacgtgaaagtgaaacaaccaaaggtgcctattccttgtctattcgtgactgggatgatatgaagggagaccatgtcaagcattataaaatacgaaagcttgataacgggggttattatattacaactagagcccagtttgaaaccttacagcaactggttcaacattattcagagagagctgcaggtctgtgttgccgcttggtagtgccatgtcataaaggaatgccaagacttactgacctgtctgtcaaaaccaaagatgtttgggaaataccaagagaatcactccagttgatcaagaggctggggaatgggcagtttggggaagtgtggatgggtacatggaacggaaacacaaaggtggccataaagacactgaagccaggcaccatgtctccagaatctttcttagaagaagcacagatcatgaaaaaactgaaacatgataaacttgtgcaactctacgctgtggtgtctgaggagcccatatacattgtcacagagtacatgagcaaaggtagtttgctagatttcctaaaggatggagaaggaagagccttgaagttgccaaacttagttgacatggctgcccaggttgctcgtggcatggcttatattgagagaatgaactatatacacagagatctgagatctgcaaatattttggttggaaacggcctcatttgcaaaatcgctgattttggccttgctagattgattgaagacaatgagtacactgcaaggcaaggtgcaaagttccccataaaatggacggctcctgaagcagcgctctatggaaggttcactatcaagtcagatgtgtggtcatttggaattttactgacagagcttgtcacaaagggaagagttccctatccaggcatgaacaaccgtgaagtgttggagcaagtggagcgtggttacagaatgccatgtccgcaggactgtccaatctcactccatgagcttatgctgaactgctggaaaaaggacccagaggaacgcccaacttttgaatatctacaagggttcctggaggattacttcactgccactgagccccaatatcagcctggagacaacctgtaaaatgctgcctgcagaaagttgtcgccaggttcaaccccgtagaatttgcttccagtttattgagtgcccactataaggagctcttatcttccagtgcagactgcacacaggtgtggagctgagaacttccacaatattttgatgaccacttatataataatctgaatgttctcttttgaagaagacaaaaactgtggcgaaagttatcagaaaagcaaaacacaaaaaaaagcccagtactcatacacaaggactttgagataacgcattttatcaatgttatataaactgcaagacctctctacatggtcaattgtaactctgtgccaattcccaatcatagagcctttgatcctttcagtttgggttttgaaaagcggagcacttgtcatttcagccagtaaccatcttcagaagtattgctttgcagaagtgccctcttcatctgatgaggatatttcacttaaaagtattgatgcaatcttctccatgttttgcttccttttttttatatatacatataatgcatacaattgtacatacagtcatcaattacaccttgtacatagtcaaacttggatgccttttaggaaaggtctttgtttctctgctgtttccccgataaaaagactcgctaacaatgctgaatatgtaaaaaaaaaaaaaaa

SEQ ID NO: 4 - DNA, 3716 bp, Xenopus laevis
gaagggagagatgcagtagaataaccagcccattggctttccctttctttttaaattttcatctcagcctttcctgcgcctctgcgtttcatttgtttgctttacacctttagaacagctcatatctactttcagcgtgaattcctgaaaagatgagggaaggtgttgtgacagtgtggatgctcgcggctcttgttctgcatcttgccagtctttccgtctccgctggaagacctgtcctcaccgatcattttttggttgacttacgtgaaggaggagaagccgaagccgagcaacttgcggcggaatatggcttcagtgggacaagaaagctacctttttcccaaagtttataccatttttacggaaatggaatcaccacatcccgaagtcgacgcagtgtcaataaaaagaaacatttagccatggatcccaaggtaaataaagtggagcaacaagaaggtttccacaggaaaaaacgaggatacagagacatcaatgatattgaaattaacatgaacgatccattatttacaaaacagtggtacttgatcaatacaggccaagctgatgggacacctggacttgatcttaatgtcgcggaagcatgggaacttggatacacaggaagaggggttaccatagcaattatggatgatggaattgattatctgcacccagatcttgcctccaattacaacgcagaggcaagctatgacttcagcagcaatgatccctacccgtatcctcgatatacagacgactggttcaacagccatgggacccgatgtgcaggagaagtgtcagcatctgccaacaataatatatgtggagttggagtggcttataattccaaagtggcaggcattcgaatgctggaccagcccttcatgactgatataatagaagcttcatccatcagtcacatgccccaggttattgacatatacagtgcaagctggggtcctactgatgatggcaagacggttgatggaccaagagaactaactttacaggcaatggcagacggtgtgaataagggtcgtggtggcaagggaagcatctatgtctgggcatctggagatggaggaagttatgatgactgcaactgtgacggctatgcatcaagcatgtggactatttccataaactctgctattaatgatggacgcactgccctgtatgatgagagttgctcctcaactctggcctccacttttagcaatggtagaaaaagaaatccagaggctggcgtggctacaacagacttgtatggaaactgcactttgcgtcattcaggaacatctgcagccgcaccagaagcagctggagtatttgcattggccctggaggctaacccaggtctgacatggagggacttgcagcatctctcagtgctaacatcgaaaaggaatcagcttcacgatgaagtgcacaaatggcgtagaaacggagtcggtttggagttcaatcatttgttcggctatggcgtacttgatgctggagctatggttaaaatggccaacgagtggaaaactgttccggaaaggtttcattgcattggaggagccatacaagagccaaggaaaatatcttctgatgggaagctgatccttactctttcaactgatgcctgtgaaggaaaagaaaactttgttcgctacctggagcacgttcaagcagttataaccgtcaattccactcggcgaggggacttgaacatcaacatgacatcaccaatgggaactaagtccattttattaagtcgtcgtcctagggatgacgactcaaaagttggttttgataaatggccatttatgacaacacacacatggggggaagatccaagagggacttgggttctagaagttgggtttgttgggagcataccagagaaaggtgttttaaaagaatggacactgatgttacacggcactcaaagtgccccctatatagaccaaatagttagagattatcagtctaagttagcaatgtccaagaaagaagagctggaggaggaactagatgaagcagtagagagaagtctcaagagccttttgagcaagaactagcactattctgcatgtctgtattatgtttatattctccattattttctgttaatcttttcaacacctttaccaagtataatttcctcgctgtgttacagtaatggaatctttctagatattttcttttgtgtagaaaaaaaataaatatataaatatatatatatttttacaatttgacccctaataacaatttcaaattataatatgcaatctgtgccagtgtattattttttgcttgtttcataatactttcgttgctgagcaacagaaaccaaggcgatatttatcatcggtttcaacactacacaattttgaagttttaccggatactactttgaaattgtgtatgcaaatgtattttgatactaaaaacaagaattccagtcattaatcctcaaacgtctctgagattcatattatcatataattagagaatagtatatattataagattcatttagaaatcgaattgttaaaactgccagttaacattttcatccaagcacaataattgtaaacagggttggagctattgtttagggggacccatccattacaggagggttagggcccaaatctgagctaacgtaagtcatgtagctaagttatgacccaacctgcagccctctagctattcaactatatccaccaaattttggtggttattagtgatgggcgaataaatttggcaggcgcaaattcgcggcgaatttccatgttttgatgccggtgaataaataaactacagcaagaatttgcaggtaaaaattccgccatgtcaaaaaaaaattgtcgctcgtcaaaattgatgagcattaaaataattttgacgcccattgacttcaatgtgtttcgtgaatttctcaccgtttcccaaattccacggaacacatttgcccatcactagtggttatcagtggtatcctgggtattgtaatcaagaaaagtaaagtaaagggaaaccagtaggtcgatcctcccctgatgaacatggccttaggctgaattagtcttacaggccatggaactcagaagtgttttttcataaaacacaggttaattgacatcactaagcactgattataaatgatagcatcactaagcactgttcataagtatatcttttacaggtttattgtgactttttttgtattatacagaaataactaacaaatctgacacatttgctctattgtgtacttatatcaacatttttccccaaggaaatgccccctctactctaccctaaatcagtcttgcttatttattacctcaaagtaatgataaggaaggacaaggaatatcctacaccctgtactgtaaggattctcttcatgtctactgtcataaagtatatgtataaaggtatattaaattaaacattttatatgtggacagatgtattttatttggagatattataataaccaaagtaatagttttattttgtgtctaagaaggaaaaaaaacaatggccacatgcatgtgtatttaataaataacatagaatatttgttttcagattttaaaaaaaaacattctgtgaaaatatcagatgatcctgtagagctgatttgcattcttgttttgtcagaatattaaatgtcttatgtagcaagaaaaaaaaaaaaaaaaaaaaaaaaa

SEQ ID NO: 5 - DNA, 1818 bp, Xenopus laevis
gccaagtggaagctgcgggaactagttggcaatgcccagctctcaaaacccaccaagccttttccaactcactatttaagatctgtgatctccaatggttttactcaatgtaggatgggacttaagctgagcggcagatatatctttctggtcctcgctgtgcatctagcatacctgctgcaggcggtgaaggctacaggcaaatgtgatgcggtgtttaagggcttatcggactgtatgctcacgctgggcgataaagtggccaactaccctcaagatctggaggaaaagaaaaatctcgacaccatatgctcgtactgggatgattttcacgtttgcactgtcacagcccttgcggattgtcaggaaggggcagcggatatctgggagaaactgaaaaggcaatccaagaacctcaacattcaaggcagcttattcgaactttgtcctggatctgctggggcaccgggacaaaggctcctatttccagcttttctgcctttactaatggtgttcctctctaccctattcatctgggtacttcagtagctgtccacctctgcccaactcaactgcacccttcacaagatggccagctcttatctaccaagttggatccttcagtagacacccattatgctgtactcagctgatggccagctcttacctgctgagttggatccttcagtagatgcccattatcctctactcagcacatggccagctcttgcctgctgagttggatccttcagtagatgaccatcaaactctactcatctgggtctttaagcatctgatgtgtaccaaactggattttccagtagatctaaagcttgaggaatgtgctcccattttccacttgctggatttctagagggaatatctaaaaaaaattaccatctaggcttgttgaggaagaaacattctttattttgtgttttttgtttttgccaaaatgttaccaaaccatgagcaacaacagccaaatgcggacctcggctttacatcagagtttaagcatcaagccctaatttttgcaaaagaaactcaggaaaggccctgggccaagtaataataataataataataataacacttctagtaataacaatattaggaggaaatgaagttgggctcagataaattaaagcaaataagtatggattaaacacaagatgcaaagaaaaatgctacgggacctctgcatccaaagtgtgctgtaggtgataacatgtgaggcataagggcaactcacattctgatgtatctcattaaccccatcacgcacagaaccatgatctcttcattccacagaattgttgtaaccaagaggaaaggatctcacagcacagcaatgaaatcacacacatataccgacagagagagacaataaattagtccatgaatggctgctcggacgaatgggtgtgtgaatgcgaatactggatgtataggagtgctgagcaagttcagctttatctgttgttgccaagatatatttcaaagttcactgcctttatttttcttttctcagattagatgttaaacatattacttaaatatccaactgtgtaacccataaatgggggaaagtaaatgtataaccgtacaatagttaaaaaatatatatatattcaagattttgaaaaaaagagagagagagagagagctttgattttaaaagaaataaatgtaatttaacaaaaaatttattaacttaaatcagcaaaaaaaaaaaatttgctacagaatatagttaaaaagtattgaataaaattattattgtttcaaaaaaaaaaaaaaaaaaaaaaaaaaaaa

SEQ ID NO: 6 - DNA, 6024 bp, Xenopus laevis
agagagagaggttgtagcgtggagctgcgctacaatgagccatattccattccttacggtcaccatgaactggacttacctgtggatcttgctgttccttcttccctacacaggagaggccgttcctaaaatcaataacggagacgacagagtcactgttaatgttggtgagcgattttcattggtatgcagagatgttcagttagttaaattggcttttcagaagttgggccctctgaagaaacctcgagatttgaaaagccgttcatataacaaaagcaaaactgatcagatcatagtcattgctaaagcagatctcaagcacgtcggaagatatatatgcacgaatacagagacacacgaaaatacctctgtctctctctttgtaaaggatccggcaaggccattccttgatgtcccatttatcgatgtaatagaaggaggtgatgcagttggcatgtgtcttccttctgatccggacattgtcgatattactatagagaggtgtgatggttctcctttgccagagaattttaccttcacaacaggcatcgaagctggactcacaatcaaatcggtgcagatggagtttgttgattgctatgtatgttctggaaatcagagtgggacattgaagaaaagcggcacattctttattcatgtagagccagaacccaaaaaagtaccaactgtatttctgagcaaatccagacaactggtcaaaacaggagaaccatttgaagtcacctgtacaatagtggatgtttttagttctgtaaaagctcaatggttggatgccaaagagggtgtgacaaaacaggccaatttcctatcatctagcatctttagttttaacttaactctgaagagcgatggttttaccttcagtgaatccagaacgttcacctgtcaagcagaaaactcagttggccaagtgaatgccacattcacattagatgtcatagatgttggatatgtcaatctaactgtcctggagaacacaacactcagtgttaatgctggagataacctcgtccttagggtttatattgatgcatatccccatccagatgacggattttggacttattttaatgaaacacttcaaaatacttcagaccattatgttgagacaagagacaaaggcaacaataggtacgttagcgagcttcatttgattcgcttaaaaggaacagagaaaggcatttacaccttctatagctcaaattctgatgattttgcttatgtcaacttcaatatccaagtaaaaacaaggcctgaaatcctcattgctgagagaactagtgaaggcacgttacagtgtgtagcaacgggataccctgttcctgctattcagtggtatttttgcccgggaagtgagcagagatgcacggactatccaccaatttcacctgtaaatgaaaaatttatccaagaaaattcatccctcgggcgcgtagtagtggaaagtaccattgacgtcaatcatcttaagaaaaatggcaccgtgcagtgcgttgcctccaacgaggtggagattgcttcttcagtattcagtttcgccatcaaagagaaacttcgtgctcacactctgtttacccccttgctgattggatttatagccgcggcaggattaatgtgcatagctgctgcaatcctcatgtataaatatttgcagaagccaaagtatgaaatacagtggaaggttgtggaagaaatcaacggaaacaactatgtttatattgaccccacacagcttccttatgataacaaatgggaattccccagagacagactttcctttggtaaaatccttggcgctggagcatttggaaaagtggttgaagctactgcatatggccttcttaaagaagacagcaggttgaccgttgcagttaaaatgctcaagccaagtgccctttccacggagagggaagccctaatgtcagaactgaaggttttaagctatcttggccatcacaaaaacattgtgaatcttctaggtgcctgcacaattggaggaccgacgttggtcattaccgaatactgctgttatggagatcttttgaattatctgaggagaaagcgggattcatttatatgtccgaaatttgaagagagctcagaagcagcactttacaagaatctccttaatacaagaaatatgggctgtgcaggaatgagtgaatacatggatatgaagccatcttatgttgtccccacgaagactgacaaaaggagatctggttcatttggggatcaggacgtgtctgtgtcaattcccgaagaggatgatttagctttggatacagatgatctgattcacttttcatatcaagttgcacaggggatgaatttcctcgcttctaaaaattgcattcacagagaccttgctgcaagaaacatcctcctcacttacggtcggataacaaaaatttgtgactttggacttgctcgagacatcaaaaacgactcaaattatgtggtgaagggaaatgcccgacttccagtgaagtggatggctcctgagagcatatttcattgtgtctatacatttgagagtgatgtgtggtcttatggaatccttctctatgagatcttttcacttgggagcagcccttaccctcgaatcccagtggactctaagttctacaagatgataatggatggctaccgaatgatgagcccagaatgtgctcctcttgaaatgtatgaaataatgagaagttgttggaattcagatccattaaaacgaccaaccttcaagcaaatcgtacagatggtggaacagcagctatcagacagcaagggaaataccccaataccttaccctgtaagtcacgttccactggaccatgcagtaagaataaactccgtggggagcagcacctcttctcaaccactgttgatgaacagcgacggctgaatctgtataagcaagctctcatagcaagggatatcacttcaccttagactgactgcagttttgctgtgcagcttctgaccataaaatgactaaaaatgtaatggtcgtgtatcccattgcagcacaaagagccaccgtgttcattgaaagaaagaactttcactgtttggttataatactgaaagaattgttattatactgttctgaagacacaaacccatgaaaatccttggcctgcttccatgacataggattagaagatgcagagatgcagatacagtgaatataatgtgctttatatgctctcatctgaaaagatttgacttttgttatattttgctttctgtgcaattcaatgtttggtcaacaaggttctcacactgggcaaagatacagaagaagctgtttctcttcactggagccgattattttggactctatttggataaaaccttgtgaaatactcttattatggcaagaactgtaaatgtagatgttatgtctgaggcttaatcctacaaggagatatcgttttttaggctctgttgtacaagtagatcttgtatttgaggccttcaaactgggttttctctttataccaagctgcagaacctttaatgttcctatctgtatagttggactgggagatcccatttttcccattgtttcttcactttagtatttatcattttcaagcacttgacatatacaataaatagtcttggtactgcagcaagatcgtttataaatattttagcttttataccccaggttttccaatgctgcaggaaattttgagcaatgtccattccttctttgtagacttgcacatacccaaatattcacttccaaatacaggttacataggaatacaaaaaagctaattgttgcattacggggttttttgtgtgaccgttttcctgaatgtaatttttttgtgttgtaatttgtgttctagaagagttgagtaagatcagagatttcgattctgaaacctacttggagttcaaaagattgttcattatgttttgactattttcttattatttggtggttgtgatctacactggtgaatgttattcagagcacccactgaccaccttactttcactgctatgtattgaatgtgtatcagccaatagtagtacagaatgctgctgcttcatgaacattcattctgaggagagcatggtgaaacccaaatggctataaacgaccaggatttagatttgggtattgtaaaaatggcttccatttggtacaccttcccacctccaacctagggtgagttataactagatgtcgaccctcctatgtacacacagagtattcatggaagatgctgaaaaagatacatatacagtaagggggttatttatcaaaatccaaaaagttctcactatttcctgaaaactactctgaccaaatctgcattgactttccccctagttatcagtaaacattcacaaatttttctggtgcgggaaaaagtcacaataaaatcgttaaaaaaatccaaatcccagaattttttcggttttgagcacaaaaacgacttttttcggaaaccctgccagttgttaacaagacatctgacattgacttttaaatgttctcggcagctctgagttggagtacttttttttttcaacagacatttaacaccatcggacgtttaatatatatcccttaaaaataaagtccattttttttctccgtaaataatgctattttcctcgactagaaaaattctgagcttaataaataacccccttaatttcagcgctttcatcgagctccacctatgtatccttgagaagtctccttttccatttaaaagccacagccagcgtagctcaacaccaagcactcgctaataatgcaccttaacacaaaagtgggttcctgcacctaaaggagctattactaaaatagttgccactgagctgatcattgcattggactattgtatattttcccatgcaaatgggtcctcctattgcatagttcatgttggtaccttccgctgtcaatgtaatgtaatgttatattcgcatgtgcaaagccacaactagtgtctgtgaatacttactaccaagcatacttaaaggggaaggcatttccttagaacatatttttataaagtgcattttacctgtattaaatggtacagcggatctattttctgtccatgctttaggcaggcaacaaaggactacggggcagctgtataagtctgtgttacataggaaatcatacgactgcccaatgcactgacggaaaaacattttgggaactgctttttaggctaacgccacacgggttagataaaatgctggtatcaaacttttctttgctgtctgtcactatcatatctgcctcgggcaaacaattatcataaaacatatacaaggcaaataggagggccttgtagcatcatccttagtgtccttatagccatcttggaatgtattattcttgagcagaagtggtatgtagcgctgcacctgttgctgaacggcagcccccagcaggctataacccaccttgagagatgttcttaaccaacatctcggttttacatttgcactggacttgtctttgctgttgcgccttttctgtattcctgtttaaataaaaataattatatttacctcttcactgcatggttggttcccacagcagcaattgggtaaagtcctaaaatccactgtataatgtttgtaatgtcattgttaaataaacaatttatgcacacacggaggtactttgggtgcactttgttggacactttttattttaatgctttcaagatgtaatatatttttgtatatttttgttacaattctacaggtttttttttttactgtgactggatgttaagtctttttgccgtatttgtttttttgtttttgtaaatactaaacatgtagcaataatttgtttgcaaagtccccaatgcctctcagaagtatttttctatatatgtaaatatgtgtattttatgttgcaagtttatggcatcttgcattagttgtttggttgttgaagcattaaaaaaggtaataaaaactttgaatatgaaaaaaaaaaaaaaa

SEQ ID NO: 7 - DNA, 1290 bp, Xenopus laevis
acattctgaagcactgcttatataagggtcaccttgtctggtagaggagcacaagaaacatttgtacggacaagcgctggataagcaagtacttatttctaagatattcacagggaagaagggagatgaaaatggttctacgcggtgaaaaaggcaaccatgtgcctttattctctctcagacgctgtggcctcactatggtggttctgcttttccttcttgtaatattgctatgtcccgacagtacaaatggaaacaaacttaggaagatgctgcagaagagagaagctgtggagccatctaaacccattgtttcagtgaaagaaagcaaagctaatgagttcttgaattctctaaagaggccaaaacgtcaactttgggataggactcgacctgaagtgcagcagtggtaccaacaatttctctacatgggttttgatgaagcaaaatatgaagatgatatgtcttactggaagaatcagggacgtggaggcagtgaatactatggaggcttccaccagcatcactatgatgaagatgctgctattgggccacgcaacccatatacctacaggcatggagctggagtcaactatgatgattattagatccagaattgaactattatccccccccaaaaaaaaatgctttgtgacaaaaaaataattaacattgtgcattgcattataaaatgtcccatactagcatcttacagtgataataacggaaaaagacttttgaatatataaaggattggcatctaccagggcaataggaattacacccgcttcatttcaaagtttgttcttatatgaaatggctaataaaaccacaaataaacagtatagtatataaatacacaagagctaagactatccttataaaaggtgctaagtgatgtcattgttataataggagcttagtgaggtcatttcggtcacatgactatctgaaacttgtgtattataataaataaattttccatgttgaaaaatatgaggatattggaattcaccacggagttccatgacctgtataaaagcattcggtctttggcctcgtgcttttgtatggtcatggaactcctcggtgacttgtaatatccttatattttacatgagggggtactttattcactatataataaaatcaacaacagccatgaatattctgtaaagtatatccttataatctgtttttagtgatgtaattcctgtcacgtgactcacttaaactggagtatttaaataaattaagtaccacctgctgaaaaaaaaaaaaaaaaaaaaa

SEQ ID NO: 8 - DNA, 2334 bp, Xenopus laevis
tcagagctagctgttggcaagtttttctagcccagaaagagacacattatcacggaatgctaagtcttcccctaaattctgctatggaaccagaacccacaagctcagaaagcaaaggcattaattgggacataaatgatatgaagcttccgcaggatccagaacaaactgattggttccaggagtggcctgattcatatgtaaagcacatttacagctcctccagtagaaatgcacagagacatttaagtgggtgggcaatgcggaacaccaataatcacaactcacgtattctgaagaagtcctgccttggtgttcttgtgtgtagcagtgactgtacagccccggatggaagaaaggtatatctgaggcctgctatatgtgacaaggcacggcaaaagcagcaaagtaaaaattgcccaaattgcagtggacctttgaaattaatttcttgccggggtcacggtggatttccagttaccaatttctggaggcatgaagggccatacatatattttcagacaaagggagttcacgaccacccaaagccagaaacaaaacttgagtcagaaagtagaaaggctgtgcataagaagcggactgcaattgtaaccaccacccttggactaaaaaggagcaggaatgatgaggctctcgcaggtgaaaaatctgatcaggagaaccaacctggccggcaggactctcaagctctgctatatgatttcaatgacatggatatggatcactcggaaacagagaacatgctcaacaactgccttaccaactatcattttgggaaggattcaaatcagggggaaaatataagtgacccagtatggagcaaaaatctgagcagagacacccagaatgacagcaatcaatgcattggaggcgagtttataagttcggctatggaatttgatttttacagtgaagatcaacaaatgtggagcaaagttttcttttccaaaaatccacatacacaaccactagaataccaatgttgggaaaaatcacctttgcatagctgccatgccttaaataaccaacacatttccaatgcggaaccttcaataatggatggccttctaaactttaaatccaacgtggatgatgtacatgaagcaatgttgcaagtgaaccataacaatagtgtatcttcatcagcagtctaccgcctctgccaggaggactcctatatacatagatacaatcccaatcatttttctccaatcctataactgagtttaaggagtgaaagaaggtcctcattcatttttctaatgacaccatcagctcatggattgcctgtagtaatgagtaacttttctgaatagcttctgttttattacccatttgttttttatactgtcagcgcatgaaaagactattgctggaactgttttggcttgtttcccctgcagtaattataaagtagaatgaaagaaaaatattatatcacccttttcttcatcgtatttcatctgtggtggagaggcacatctctaatgtttatgaaattgtacgaatgttccgccactgaaaaacataaatcactttgagaatagttgagtcacacttggtgcgaggaaatcaaaccacattttatttttgtcaaaaaaacttatgtgactattttaaaagcattttatacgtttctgttatcaccgctcaaaagaattcttgttttatttggtgtttatgaaaacatttagatgcaggataaacactgaataacctctcctataatctgaaacaacagagttgttttatggccacccactgcacaaatgaaaggcacagaaacaatacacatttattgttttaaaaaaattgtgaattgatgggagagagagagagagtaagaaacatttatataaacatctgtattagagataaaaaaaaggatttttttcaagattaatcccagcaagattcaagattccaattcatatattcgtgggtcatctaattccaatcaacctaccttatggtgaccattaacttaagggctttcttttttattatatatatgtgtgtgtgtatgactggtttaactacctatgcttcatgaatttagtggccatgtgatggtgacatacatttgtgacaccacttttggtaggtgatccagttcaatgcatctctttcttcatttcaggtgttttgctctaatggacaataatgtgaattttatccagtcctaattgcctgcattattgcttctgcccctaaagaagaccccagtaattttccacgggttgaaatgcattggctttgtcctaaagtagctatcaataaagtcattaacttgtaaacaaaaaaaaaaaaaaa

SEQ ID NO: 9 - DNA, 2052 bp, Xenopus laevis
gataagacagtgagctactgatctactgggaagacagaagacgataagcaatcgtatttcattcccaggagccccccacccagacaagcaaagccatgaatttcctacgcaggcgcctttcagacagtagctttgtggccaacctacccaatggatatatgatggaccttcagaggccagataactccacaagctccccagtctcaccagccatggataggaagcaacagcctcctcctgccccagtttcagcctccacagggggaaccagcctcttcagctcaatcaccaatgcagtgaagcagaccacccaagcagctgcggggctagtggaacagactggggcaccagcaaccccagtagtgttaaagcccaaggttctcctggtgattgatgatcctcatacagactgggccaagtacttcagagggaagaaggtgaacaaggactacgagattcgggtggagcaggcggaattctccgagctgaacctggctgcctatgtgaatggggggtgcatggtggacatgcaggtcatgagaaacggaaccaaggtggtcaagtccttcaaaccagacttcctgttgatccgacagcatgcctacagtatgacgcttggggaagattttcggagtctggtgatagggctgcagtatgggaacattcccagtgtcaactccctgtattccatatacaacttctgcagcaagccctgggtgttttcgcagctcataaagatctttcagaggctgggtgctgacaagtttcccttggtggatcagtcctttttccctaaccacaagcagatgctgacgtctgcaagtttcccagtggtggtgaaaatgggccatgcgcatgcaggaatggggaaggtgaaagtggacaaccaatatgatttccaggacatggctagtgtggtggccatggccaagacctacgtgaccaccgagccatttgttgactccaagtacgacatccgaatccagaaaatcggaaacaactacaaagcctacatgagaacatctatttctgggaactggaaagcaaacactggctctgcaatgctggaacagatcgccatgactgacaggtaccggctgtgggtcgattccgtttcagaaatgtttggtggactggacatctgcgctgtaaaggccgttcacagcaaggatgggaaggattatataattgaggtgatggacagctccatgccactgataggggagcatgtggaagaagatcgccatctagtggccgatttggttattgctaaaatgacccaacaagttcatatgacgtctcaggcagcatctgtgggccgacccctggcaatgcctcaacaggtccagcctcaagctataaaaccccagatgcagcctcagcccggacccccaggctccgctcaacctcgacctgctccacaagtggccctcgccagacacaaggctctcctgcccagaggacagggcctccagcacaaccaagactttctccccaaggccaacagcctcagattcacagcctggctccccacagacacaacgtctcgtaattccccacagctcccccccagacctgcaagtggaaccccaccatcccaaacccccaagtctgtttcccctcagccctcaagaccccctgcccaggggcaggcacaaaacccaccaggacttgggccaactgcaaaaccccaacccatgctcaacaaatcccagtcactgaccaacaatttcaatatctcggatccttccgcacgcagcactggcaacgaagacgaggcgaaagcggagaccatccgcaacttgagaaagtcgtttgccagtctcttctctgactaatcccgagctctgctgtcttcctatccaatccacacccttgtataagtcagaatcttccaggccttccttccaggctccttgttaatgttgaaggtcctttgagtatttgatttgcactgtaggagccacccatggtcttctgggcccatttcacccatatccagactaactgctcgccggaagccaatcacatggcgtatcccagtatgtataa

SEQ ID NO: 10 - DNA, 2951 bp, Xenopus laevis
cgttgcaagtgcgctggactcaatgcggccaggcggacggtgcctctgacagacaatgcaagtttgctgctgcgaccgtgcgacttgctgagatgagttcagggagccagttgatgaggcaggatcgcaggggctgcgctgggagatgattgcatccaccagccgtgttgtgttcctgtccctgcctgcttttgacttgaaaagatcatgacagaagtctttctctcagctcttttgaatgttactcaaagcactttgctggcaagtggctcatcagctgggaatgtcacaaaatgctctctgacaaagacaggctttcagttctattacctccctgccgtctatattgtcgtctgcatcacgggattcattgggaacagtgtggccatatggatgttcatttttcatatgaaaccatggagcagtatctcggtctacatgtttaacctggccctggcagatttcctttatgtcctgtctctgccagccctgatattttattatttcaataaaacagactggatctttggggatgccttgtgcaaactgcaacgctttcttttccatgtaaatctttatggcagcatcttgttcttgacttgcatcagcgtgcaccgttacacgggggtcgtgcatccacttaagtcacttgggaggctgaagaagaagaattccatctacatcagtgcactggtctggttcattgtcatcgccggcatttctcccatccttttcttctctgggactgggatcaggaagaacaaaaccatcacctgctttgatacatcttccgacgagtacctgcgaagctacttcatctatagcatgtgcaccaccgtctttggattctgcattcccttcattctaattctgggctgttatggattaatcgtcagagctttgatttacaaagatatgaacaatgcccccctaagaaagaagtctatttatctggttattattgtcttgactgtctttgctgtctcctaccttcctttccatgtaatgaagaatctaaatttaagagccaggctggattttcagtctcccgagatgtgtaacttcaatgacagggtgtatgccacctatcaagtgactaggggtcttgctagcctcaatagctgtgtagaccctatcctgtatttcttggcaggcgatacctttcgaaggaagctttccagggcgaccaggaaagcatccagaaggagtgaggctaatgtgcaatctaaaagtgaggaggtgactctcaacatcttatcagagtacaagcagaatggggacacaagcttgtgaagatgaaaggtcagggtggactgtgatggccaactgttggaacacatccgttcagagagtttccctatggtgtgtacgggttaattaacagatcgggcaagaaccactgcagttttggttagagggagctgaacatcgttctacagcatgagagacatttgtctttggaggagatcggagaagaacaaaaaggatgttcaatctgtgtgtatatggtgtgtgtattcgctatctacactatctataccatggtattttttacttttactaattattccagaaactactgtgaataaggattaactacagctaacatggtgaaggaatgtatctcaacaagtcctaatggctgtttcaagttaatctaaggatttgttaccagcggttttatttcttgtgcatcagttggcttagcagtagacctacagtagaccccccccggggggacatcagttgagtattattgcagtagaggtatatgttaaacaataattctctatgttcatagagggctggcctgggaagtgcccctttctatatctgtcaatcgtttatgtagctgtgtcagtaaaagaagatgaacaaaatgaaatatctttgagccaaaatccaatacattgggttgacagaaaagtgctgaaatagattatttcccccccccccttaggctggtatctattgcacaagcagtagattctttgacttaccctttcatcttgtgtagaacaattacacaccaaatagagttctttggaaagtttttccgcatcaaggagaaatctgattgctcgggggtcttatcactggggaaagctaacgaactacaggactgaagctgaaaagcctactagttagctattgctagatgattagttacctccagctcattaatgcagggcaagtgttatgcttggtcccatttaaacaccacgtactgtaacggggtgcacttttctttttcggtatgctggcccatttaacaccacggactgtacggggtgcacttttctttttcaatttattcaatttcttttaaatcctttgttctgatccgggcaactccggacaaatacaaagtatataaagtcttgaaatagggttgaaggggtttccgccagctcctacataccaaccgttacattttcttgatgtggggcatgatatccgatatcttgtcaaatgaatatgaagggatacatatgtgatatacacgtttaatgtactgtggacatttttgcatttagtacgtgttttaatgctcctgtggaaaaaaatgttttatttttgtactattgtaatttaatatagttcagtaaatcggtttttatttgtgatttaacagtgccatttaattgattttttttgcctatggagacagtgttacttgactttaaaagcttctcaggttttgtaacagatatcgaatagtagattgccacaaaatgtgtttaactatcacaatcaaagggttgcccgttgccgtacggcgctgtgatgtgtgcatgtaggtgtacagtgtgtgtacagcatggtattagacactagcatctttacaagggaacagcaaagctacacaagtgtgtctggtgttgtacttagcaatttaaacctgaaagagatccaataaaactctcaaatattaaaaaaaaaaaaaaaaa

SEQ ID NO: 11 - DNA, 4370 bp, Xenopus laevis
gaattcggcacgagcgggagcgagtccgttttgcagaagggaagactatgtcattgtaaatgcccgctctgcggctccttgtctgtctctgctggtttctagagcccgagtctcaccatgattgatagcagcaagaaacaacagcagcagccgccgcagcactactcctttgccgacattctatctgccggcgatttggatccattgaaggagaaggaatggctcgatcccggcagccagaaaagtctgaaggaagttctccaactgcgtcttcagcaaaggcggacaagagaacaacttgtagatcaaggcatcatgccaccattaaaaagtccggctgcatttcatgagcagattaaaagcttggaacgtgccaggactgaaaacttcttgaaacacaagattcgcagccgtcctaaccgatcggagctcgtgaggatgcacattttagaagaaaccctggcagagccctctttgcaggccactcagctgaagctgaaaagggccagacttgctgatgatctcaacgagaaaattgctcagagacctgggccgttagagctggtggaaaagaacatcttgccggtagatctgagtgttaaggaggcaattacagtcagccaaactaacttacctgaaaacctggacaccctctcattcgatgaggatagcagtgatgctttgtctcctgagcagccggccagtcaggagtctcaggggtcagcggcttctcctggtgagatgaaaacaagtgactcctcttctcctgtctccaacactactatccagtgccaaactgtaagttcacctcttccggatttctttaaacctgtgcctactgctgacctcactacccgatcccctctgtcctgcattgtctccaagcctggcccagctctcattaagcaaacccagcccaagcacactgagaaaccccgcagtaagaagtcaaaggatcctaagccacgggtaaagaagctgaaataccaccagtatataccacccgaccagaagggcgagaagattgaagaagagatggactccaactatgcccgtcttctgcagcaacagcagctggtccttcaactgcaaatactgagccaacagcattcaacacttacaacttccagaaaatcctacccagcaccactaaagtcacagaaaaaacaaaacaccataaacacaaccatctgcaatgggaatgctggcgcaccacctgcccagtgcagtgtcaacagacagaatagcgttccttgtaaaaaaacaggacccctgccttccagcctggacgatatgaaggttgctgaactgaaaatggagttaaagttaaggggcctgcctgtgtctggcacaaaaatggatcttattgaacgattaaagccattccaggacttcagcagcaatggcgtttccccaagcagtgccaacacagtgaatatcactaaccctgcctgcaatacaacagatgatgctacaacagccttttccacttctgcattaataaactccagcagtccaacacctagtgtttctattggcaacaaccaaaccatgttagatggcattaattcaccattgcccatgtcccctacaccttcagaacagtccaatttcagctcagaagatactaacataacagacacttttgcggaaattctgacaatgatgtcaccatcccagtttatgaatacttcacctttaaaagtaaatgaggacagcatgggagcaacccctggaaacacaccaaatgtggaattggatgctgtagagaaagaccgaaagcttcaggaaaaagagaagcaaatcgaggagctcaagcgtaagctggagcaagagcagaagttggtggaagtactgaagaagcagttggaattggagaaacgtggccaacaacagcagccatgttctaatgtcctgctaaaaatggaaccaaagcatttcaaccttcagataaaagaagagactgaagcacctgattgtcaaaactctaagcaacctgttgggtcaggtggacaaatcctagggcaagctactgctgctaccatttcccagaatattattgccaacaatgcggttgttattaagcacgaagtacctttagccaaacccgagcatcagaatgttatccaacaattttatgtaacttcccagaggcctcctcagactgcagtggtggcacagccccaggcattgctagccacacaaacggcacagcttctgcttccactctccatcaaagctgccaatggagtgcagttgtccatggttcaggcacagccacatactgtaaatccagctccagctcagctctccactgcagcagccaccactacaactctgctctctgcaccacccaaacagtcggcacctccgacacaagacaaattcacaccgcacttgctgaatcagaaccagcaaatcagaaagctttgtccgtctgcaacatcaggcaacgtgttttcctacccgcagaatccagttactgcagttccacaatccttcagcgctagtatatcaactagtgcccagccacaaagaagcacccagcttactgctgtgcagaatggtcccacatctcttcatgagaagtcgtctacacctccccaactccaacagttcattgtacagcagcatccattgttcagcagtcctaccactaaatccaaggaccctccccgctatgaagaagccataaagcaagctcgaaacaatccagcatcgcagccagaggtatctaatgcgcacagccagcagatggatgacctgtttgacattctcattaaaagcggagagatgtcccctctaattaaagagccatcgcccatatcaaagatgagacccgttactgccaatgtgaccactatgccagtgaacactgtagtatcaaggccgcctccacaaatccacatggcaccacctctgtctctagaatcaacaaacagcttgtcggttagcttagagagccagttagaagccttcttggatggaactttaccttcaggaaataacattccacacctcgaaagcaacagtgatgacagagaaacgttttccctcatagacgacctcaacaatgatcttctccaaaacactgccatgctggagcatgaatctactcccatggagaccactgatacaccattcacagcaaatagctgcttatctcttgatctcgctgatgcaaatctggacaacatggagtggctagacctaaccatgcccaattcttcatcttcactaacacccctaagctctactctcccaagtatgttttccactgacttcctggattccaatgacttacacttgcattgggaataggacttctcatgtgggtggcatctaacatttcattttggctaataggcttgggtgcatagctggaactcagctgcctgcaccaaacgcaagagccgctgaagtgttttctcagatctcctgtccataccaaaccactacaggttggcgttgatggtaggtcatatttgttggaaactgaatgaaacacaaaaatgataaaggaatggtgtactttaatgtacaaatatattgcataaaaatgcatttaatttgtaaaaagggaaaaaaataagttttacaaattatgaatgtttctgttgacaaaactgcacttgactgttactgtgagcgggttgagcctatgcgcattctgagacagagaccactggctggttcagtgcaactttacttgggatcgaaccctgactagcataaatatatgtgttttaatctgtacggccatttctagatcccttgtaacacaggatgatgcttggctttgttcaaccaacagctgtaagatccagtggaagactgagctgttatattattgaatacaacaggcttctctctctctctgtaacatgtttataatggaaaattgggggggggggagatattggttgcacaaatatatttttattttattcctctaggaagctggagtctgtaaaattggaaactgaattgtacagagtttatgaatgtctttgtttttctgcgtattacagaggaaacacgaggaagctcttattagccacttcttctaaacgagccgtggtttcaaagaaatgaggagaggttaatgtaggctgtaaatacgatgtataatcctcatagctttgtcatgaagacacacacaaggaatatattttatactgaatcactatatactgagataaatttgtataattccttaggataaatggaatgaaaagcatgcacctctgttatgtctcctctctcgtgtagataaacttgtcatgatctcagcgcaaaatgagcgctaatgtttgttggaacatttttcaagtaaaattgtttaaaacgccaaaaaaaaaaaaaaaaaa

SEQ ID NO: 12 - DNA, 2631 bp, Xenopus laevis
atgcccgggtggatgaataagcatggatctcgatcgactacctcgttgcctccggatcccatggatattatcaggagcaaagcttgctcaagacgggtgaaggtaaacgttggggggttggcacatgaagttttatggaggaccctggataggttaccgagaacccggcttgggaaacttagagactgcaacactaatgaatgcctcatggaaatatgcgacgactacaacctggaggagaacgagtattttttcgacaggcaccccggcgccttcacgtccatcttgaacttctaccgtacggggaaattgcacatgatggaggagatgtgcgccttgtccttcagccaagagctggactattggggcatcgacgagatctatctggagtcttgctgccaggctagataccatcagaagaaggaacagatgaacgaggagctcaaacgagaagcggagaccctacgggagaaagaaggggacgagtttgataacacctgttgtgctgacaagaggaaaaaactgtgggatttgttggagaaacccaactcgtcggtagcagccaagatcttggcaattatatccatcctcttcattgtattatctacaattgccttgtcactaaacacacttccagatctacaagctattgatgaatttggacaaaccacagacaatgctcagctggcacatgtggaagctgtctgtatcgcatggtttacaatggaatacctcttgagatttttgtcttcaccaaataagtggaagttttttaagggaccactaaatgtcattgacttgctagcgatcttaccgtattacgtcacaatattcctcacggaatcaaacaaaagtgtacttcaattccaaaatgtccgacgggtggtgcagatattccgaatcatgagaatacttcgaattctaaaattggccaggcactcaactggtctgcagtccttgggtttcaccttgagaaggagctacaatgaactagggttgctcattttgtttctggcgatgggtatcatgatattttccagcttagtcttttttgcagagaaggatgaggacgatacaaagtttaaaagcataccagcctcattttggtgggccacgatcacaatgacaacagttggctacggtgacatctaccctaagacactactgggtaaaatagtgggaggtttatgttgcattgcaggggtactggttatagctcttccgatccctattatagtcaacaatttttcagagttctacaaagagcagaagaggcaggagaaagccgtcaagcgcagggaggcactggaaagagccaaacgaaacggtagcattgtttccatgaatatgaaagatgcctttgctcgtagtgtagaacttatggacgttgttgtggaaaagacggatgaaacctcaggaaggaaagataaagtccaagataatcacttatcacctagcagatggaaatggaaaaagaggaccttgtcagagacaagttctaataaatcttttgatgctaaagagcaaggatctccagaaaagacccgatccggctcaagtcctcaaaacctcaatgtccagcagttagaggacatttacaacaaaatggcgaaaacacagtcccagccaatactcaactcaaaagatttaaatcagcctagcaaaccagcagaggagctagaaatgggatcaatccctggtcctacagtaccaatgttagcaactcaccgagagggatttattgacatgagaagcatgtcaagcatagacagtttcataagctgtacagctgaattcccagagtccggcaggttctcacatagtccccttgccattcttccatacaggatgaatgtaaattcagggcagaacacttctcatgggtataaagaaagtcgtgttagaccattatcctcagatgttagccgagagagtttcacagaagttcaccccaaaactgatttaagccgtcatgctacatatattttggaaagcccaaaaactttagtgaaggtcaaaaaccctttaatgttgaggtctctcaaagtcaactttttagaaggtgaaactagctcactgctacctgcaccaaatgtattaagccccacatcacacagacaggaagggccttctaaccaagacacgtctttcatttatgaacattccgtacaaagtccagaaacatcactgtacaccacagctagtgcaaggacaccctccaaatctccggaaaaacacatggcaatagattttacttttcacgatgctaatgtacataaatacatagacgctgacactgatgatgagggacaactgctagatggattggattccagtccttccaaagagttgctaggaaccatgagcccaaaatataacataacaaagagcggccatcgaacgcagagagataatgtccatagaggggacaagaaccacctagagggtgctcctttcttgagttcatcaaggtatgtaggccaaaactgcatttacgctacagaaggtatgactggaagacgtcagggaaatctggagacagtcaaaatggaaaaccacatttcaccacaagtccatgtgctacccggtggtggtggtggacattcaaataaacacaatcccagcatctga

SEQ ID NO: 13 - DNA, 2746 bp, Xenopus laevis
cccaggtgaggttatgggatcaaggtgactgagtggaattcactctcacctgcagctcattcttattccactcacactcgccccggggacgttctgctccacttgccaaggactttataataaatacctgcaactgtcagactgtcagactgtgggactggggcagccgctgacaagtattggggtgtctgtgcctcttggctgctcttgtgccccattcacggatcttgggatgaattgaaggtcacacgatcctctgaaacagcagaaccttcactaacctgatacaggaattataggggacggatgtgaccgcgtttccctttcccaccccgtgtgacatcactgcacatctcatcactgattggatcgactcatcatgagccgtgtgctggttattgagcagagggaaggagaggagaaaaccctcatacagaaacatattttccgccccttcccgaatacacggagggttgttatagatcacctgcagcgcttgaagaacttccttttccgaatcggcgatgactggtacttcctgtttgcacttggcgttatcatggcgctcatcagcttcaccatggactttaccgtctccaaaatgctgaatgcgcacaggtggctccagcaggagctcggggggaacgtgctgctccggtacctctcctggattgtctacccaatagcactcgttgccttctctactggctttgcccagagcatcactccacattccggaggttctggaatccctgaactaaagaccattctatctggagtgattctagaggaatatctcaccatcaagaactttggggccaaggttgtgggcctgacctgcactttatcagccggcagcaccatgttcctgggcaaagtgggcccctttgtgcacctctccagcatgattgcagcctacctgggcagaatgagaacttctgtcgctggggattatgagaataagagcaaagagcatgagatgctggtggccgctgctgcagtgggagtatccacagtctttggggcaccaataagtggagtcctgttcagcgtggaagtcatgtcttcgcacttcgctatccggaattactggcgcgggttctttgcagcgacctgtggggcgtttgtgtttcgccttttagccgtattcaacagtgagcaggaaacaatcacagccgtcttcaaaaccagtttcaagatcagcttcccctttgacctcccagagatgttcttctttgccatattgggggtggtgtgcgggctgattggctgtgcctatctcttctgtcagcgctggctcctcggatacgtcaggagaaattccctcacttccaagttactggcctctgataaacccatgtactcagcgctggtggctctcctaatatcctccatcactttccctgagagtctggggcagtttctggcatcaaggctgacgatgaaggagcttctcacctccctgtttgacaaccggacgtggtggatttccctttcccagaattcctcactggacaggtcccctctggtggatcccaataatttgtggctggagtgggcgaaccctcagttcacaatatttggaaccctggccttcttcatcatcatgaagttctggatgttcattttggccacaactctgccaatgccagcggggtatttcatgccggtgtttgtgtttggtgctgccattggacgcttggtcggcgagactgtggccctcctctatcctgaaggaattgctgcggatggcattgttaaccctatcattccaggaggctatgcctggcagggggctcccgcttactctggggcagtgacacactctgtctcaaccgcactgctcgcattcgaagctacgggacagatcgcacacatcctgccggtcattctatgcgtattaatcgccaacgcttttacccagaagttgcagccatctttctacgatggcaccataatcgtgaagaaacttccgtatctccctcgcattcggagccgcgacatcgattcctataaggtgaacacagaggagtttatgaacccggacatcagagttctgccccgagaagccggatttgaagatgttctgaaagtcatcactgcgtccgacgactctgagtacccagtggtggataatacagagtcgcaggttctggtgggcacagtcaagagaccacaactgatccacttcctggagacccacgagtcacatgagcgagcgggtcccacagagaaagagaatctgtctgaaggcaatcttggtgaggcgtgcagcatcgagccagtcaccttccagctctccacgtggacctccctgcaccaggcccatcatctctttgagctcctgcatctccagaaagcgtttgtgactaaatatggccggattgtggggcaggtcaccaggaaagagatgaagaaagcgatcgaggaccttgcgaaccccaagtgatcaatctggttgccaggggccactcaggtaccggcatgggggtaaaagaaattcattaaggtttctaacctgagcctctttcgacctacaactcccagcattcccccaacagactttagctgccccttctggcaggatcgatatgtatcacaatatacccagaatgcattgttgttgaatgaaaccctctctaggtccaatgactgacaatctataccagccatgtctgtatttaaagctatagtacatagtaaccagttcgccttgaattaaacacatatatgtcacagaaaaaaa

SEQ ID NO: 14 - DNA, 978 bp, Xenopus laevis
atgaccatctcaatgtctaatcagactgctgtcactgagtttatcctcctcgggtttccaggtctacagccgaatttctttcttccagtctcacttacaatgtttcttgcctacattgtttcactgattgcaaatagcacagtcatcatattaattatcctgagagaacaactccaccatcccatgtatattattattgctaaccttgctctctctgaccttctctttgacacaataacattacctaaaataattgccaaatattggtttggggcagggtctatatcattcaacgggtgcttcttccaactcttctgtgtccattcccttggaagtcttgactccttcatcattatgctgatggctattgatcgttatgttgctatctgcaaacctctcaggtatcactccattataaataataaggtggtgactcttctttgttggttttggtggctctgtgctgctctaattggattgatgattgctttaatgaccggtcaactcccttactgtggacgtaaccgtgttgagaactgtttctgtaccaatgcagtggtattagtgttggcatgtgccgatatcaccttggaaagaaagaaacgttttataattgcttggtctgtgcatctcttcccattgactgttattattctctcatatattctcataatcagggttgtgcacttatcagccaacaatgagaattggcagaaggcattttatacctgtaccactcatttattagtcattggcttgtactttattcccaggttgtttgtatatagtacaagtcagatccctttgattctcccacctgatttaaatgtgttacttatttgcctctacacatttatcccccatttagccagccccattattttttgtcttagaaccaaagaaattagaaatatgttagggctcacgttcaatagattattccacctgaaatccgagcacaaatctagtacccaataa

SEQ ID NO: 15 - DNA, 948 bp, Xenopus laevis
atgaagaaccaaacattggtcagtgagattgttctcttgggatttcagaatctccataacatcaagattcctctgttctctctgttccttctgatttacattatgataatttgtgagaatgttctcatcatagtgttggtgtcatcaagccggaacctccagtcccccatgtacttctttctccagcaattgtctgtatgtgactttctagagtcaacaattattgtccccatcctgctccaaactgtaaaaaatgaaggagccacaatgtactttgttgactgtctggtccaattttattttttttctctgacagaagcctttgagtgttttcttctagcagtaatgtcctatgacagatatgtggccatctgtatcccactgcgttactcttctataatgtcccacagggtttgtgttacattaatatttgtttcatggttgcttagcctcattggcgtactcattattgccaaaattatggctaccttacagttctgtgaccaaaacacgattaaccatttcttctgtgatttctttcctatagtagagctttcttgctcagacacttacctggtgcatataaatattatgttacagtctatccctgtgattttcatcccctttatactgatcactatatcctatatctgtattgcccatgcaatcctaaagatagtgtccaataccgggagacaaaaagccttctccacctgcagctcccacttggctgtggtctccatattttatggggcactaattgctatttatgtggtcccccccagaaaagaattgcagaccataagcaaagttctgtctctgttatacacagtagtgaccccattggttaacccacttatttacagccttagaagtaaagatatcagagatgtccttcaaagaatattaaatagattacatcaagcacctagagggcagatttattaa

SEQ ID NO: 16 - DNA, 1741 bp, Xenopus laevis
gaaacagctactccccacagaggcagccagtctgctcctccagccactgtcacagctcgaacagagactcttccacattttctcaacaacagacaagaaaagcaactgcccttggaagtggatttccatttttgaatgaataatgcagatatgtgcccaataggggcactctgattccctgctcagtttgagctctaaatatacatcggggcttttctttcctgctcttcgctccctacttgttgctctgatctgtgtgtgaccagcatggaatacactccttctcccaaaccccagctctcttcaagggctaacgccttctccatagcggctttaatgtcaagtgggacacccaaggacaaagaggctcaggagagcaccatcaaacctttggaacaatttgtggaaaagtcatcttgcagccagcccattggtgatatttccattgtggattctcatggagagttcactaacagcccttcatcattatgtactgagcctttaatccctaccacaccaatcattcccagtgaagagatggctaagatctcctgcagtctagaaaccaaggagctatgggacaaattccatgacctggggacagaaatgatcatcacaaagtcaggcaggagaatgtttcctacaatccgagtttccttttctggagtggatgcagatgccaagtacatcgtcttaatggatattgttccggttgacaataaacgatacagatatgcatatcacagatctgcgtggctggtggctggaaaggcagaccctcctttacctgctaggctgtatgttcatcctgattctccgttcactggggagcaacttctgaaacaaatggtctcctttgaaaaagtcaagctgacaaacaatgagctggatcagcatggacatattatcctaaattcaatgcataagtatcagccacgagttcacattattaagaagaaagaccacacagcatcattgctgaatctaaaatctgaggagttcaggacatttatattccaggaaacagtttttactgcagttacagcctatcagaaccaattgattactaaactgaaaatcgatagcaatccctttgctaaaggattcagagactcttctagactcactgatattgagagggaaagcgtggaaagcctaattcaaaaacattcttatgcaagatctccaatccgaacttatggaggagatgaggatgtccttagtgaagatgggcaagtagtgcagtgcagagggtcagctttcacaacttcagacaacctgtctctaagttcttgggtatcctccacttcagggttttctggctttcagcacccacagtcattgacagcactgggaaccagcacagcatctcttgccacaccaatcccacatccaattcagggatcactgcctccctatagccgacttggtatgccgcttacaccttcagcactagcaagctccatgcaaggcagtggccctacattcccttcctttcatatgcccaggtaccatcattactttcagcaggggccatatgctgccatccaaggattgaggcactcctctacggtgatgacaccatttgtatgacacatgaatacaaatgattgtactttatttcttgtgagggagccactggagagattactcagctggaattcttgtgcactcttgtgaggtatagcaaaatgggggaaaacaaataaaattcttgtgtaatggccaaaaaaaaaaaaaa

SEQ ID NO: 17 - DNA, 795 bp, Xenopus laevis
agacggtttaacgctgcattagaagcttcctccccctctcattgtataaaatatactttcacttttgcttgcatgcagagagaatcacaaaatgcctgcttccaggaacccctatacggctcgtgaagtctccactgggactacaattattgctgtggagtttgatggaggagtcgtgttgggctcagattctcgggtatctgcaggtgatgctgtggtaaatcgagtgtttaacaaacttgctccagttcaccagaggatatactgcgccctgtcaggctccgcagcagatgcacaggctgttgctgacatggctcattatcacatggaggtgcacagtatagaaatggaggctcctcctttagttctggctgctgccaatctcattaaaggaataagctacaagtacaaggaggagataatggcacatctcattgtggcaggatgggataggaagcatggaggccaggtttatggaactcttgggggaatgataatacgacagccattcacaattggtgggtccggcagtacatatatttatggttttgtggactctaaattcaagcctgggatgtctagagaagaatgtgaaagatttgccgttcaagctctgtccctggcaatggaaagagatggctcaagtgggggagtaatatacttagtaaccgtgaccaaggaaggaaccaaggacagcatcatatctggagatagcatccctcgtttttataatctgtaacattgtgtgtaggaatcaattaatcactgctactaattcaataaacatttctctct

SEQ ID NO: 18 - DNA, 2263 bp, Xenopus laevis
acagagctgagtgtgcgggaagggtggagtgtgagtgccgctaagcgctgctatcagcccggtgaggaagacctactcctggaataaacaaagctcctcagaggagggcaccaggaatagaacattgagccagatacaatgaggcgtgtggtgcgacaaagcaagttccgtcacgtctttgggcaagcgctaaaaaacgaccaatgctacgatgacatacgggtctcccgtgttacttgggacagctctttctgtgcggtaaaccccaattttgttgccataattattgaagcaagtggaggaggggccttcctggtgttgcctctacaaaagtctggaagaatcgataaagcctacccaacagtctgtggccacacaggaccagtgctggacattgactggtgtccacacaatgacaatgttattgccagtggctctgaagattgcacagttatggtatggcagatcccagagaatggtttgactatccctctcactgatcctgtggttgtgctggaaggacattccaagcgagttggcattgtaacgtggcatccaactgctcgtaatgtattgcttagtgcaggatgtgacaatgccatcatcatttggaatgtgggcactggagagcctttgataaacttggaagatatgcacaatgatatgatctacagtgtttgctggaaccgtaatgggagcctcatctgcacagccggcaaagacaagaaacttcttgtaatagatccacgaaagatggaagtggtatcggagaaagaaaaagctcacgaaggtgcccggcccatgagagcaatctttttatctgatggaaacgtctttactacagggttcagtcggatgagcgaacgtcagctagcattgtggaatccaaaaaatatggacgagccaattgcactacatgaaatggacactagcaatggagttttgctaccgttttatgatccagacactaatatcatttacttgtgtggaaagggtgatagcagtattcggtattttgaaatcacagatgagtccccatacgtccactacctcaatacattcagtagtaaggaaccacagcgagggatgggctatatgccaaagagagggctggatgtcaacaagtgtgaaatcgccaggttctacaagctgcatgagaggaagtgcgaaccaatcatcatgactgttcccaggaagtctgatctattccaagatgatctataccctgatactgctggacctgatgctccaatagaggcagaggactggtttgatgggaaaaatgcagaccccgtcttgatttccctaaagcaggggtatgtgccaaccaaaggcagagacctcaatgtagttaagaagaatatccttggcagcaagccagcagcgcataaaaaggctgagccagccagtgcccccaagaagatggctgagacttcccatccacctaatgatgacaaggtggatgacatcatgatggagcttcggtcaatgaaagagaccatgcggcgccatggggaacgaatcgccaagctagaagatatagttgccagtctcaccaccaatgatgagtcagaagaatgagcagtccatactcctgactgagctggaggatcacactgccagatcagattccacccttcacattcctccaggcccaaatgatcaccattccaaaaacagactttccaccattccctttatttcactgacactttccaaatactccttctaccaggtgcctctcttaagaccctaatagtgccacttcagaagtattgcttgagagtccaactactgagggttcattatttacatttcagcttgtactttcttaggcaagacccatattccaaaggaagacatttagaccaacatctgccccagcccttacattaaaagccaagttttttttacccttagctataaagttacatgaaaattatttcctaattccaacatcagtacaatatatatagttttttttttttatcattttggttctgaaattgattttcaggggaggtgatatagaggatggaccaatgccacacttatgttttcttttgccaaaaagacctttctgtgaggttgttatattgggaccatgcatcttatattttttttatttttaatgtcaagcagaaagcactgtgttacactgtctggattgcgaaaatagtaattacccataacggctttatgagttttatataaatctttttgctaaaaaaaaaaaaaaaaaaaaaaaaaaaaaaaaaaaaaa

SEQ ID NO: 19 - DNA, 1982 bp, Xenopus laevis
gtgagtagagctcacacactgacagcacttgcggcgcttgaagagcaacatctacgttttcagtgacttgttccttgtggccggagcccgttgtgcctgacagagatactgggtagacacactcatacccagcgctcgccattccctgtctccggcggcgcttcggaaactttcccaggagttgcccagaacttttgtggcgcccggagtacgaggtcctctctgctattagagacacaagcacaaagctgctcttggtgtcgtcacactgacataagctccagtccccgtcccggtccggcgtccattctatgagcgcaaagatggaacctactttctacgatgatgccctgagcgctgcctttgcccagcacgacactgtttcctatggctacaacaaggtgctgaagcagagcatgaccctcaacctgtccgaccccagcagtgccatcaaacctcacctgagaaacaaggcggccgagctgctcacttctcctgatgttggacttctcaagctcgcttccccggagttggagaggcttatcatccagtccagcaatggcatgattaccaccaccccgacccccacccagttcctctgtcccaagaatgttacagacgagcaggaaggatttgcagatggatttgttagggcactggcagaattgcacaaccaaaacacattgccaagtgttatcactgccacccaacctgccagcacgggactgacatctgtttctactattgctggaaatactagcttcagcaataaccttcacaatgagcccccagtgtacgccaatctaagtaactttaacccaagtaccatcaccacctcagcagtttttaacagcaacagcatgggctatacaggtcaacatcctaataacccaccaatgccagtgcagcaccccaggctccaggctctgaaagaggaaccacagactgtacctgaaatgcccggggagactccaccactgtcccctattgatatggagtcccaggaaaggataaaggcagaaaggaagcgtatgagaaatagagttgctgcatctaaatgcaggaaaaggaagttggagaggattggcaggttggaagacaaagttaaaaccttaaaatcccagaactcagaactggcatccactgccaacatgcttagagagcaagtagctcagctcaaacaaaaagtcatgaatcatgtcaacagcggctgtgagctaatgttaacacagcagatgcaaacattctgaaaatactcttttggagagagttgtgaggatcattttgtagggggaaatagtttcatgttgaaactccctggcttaaaatgaaaggcactgagacctgactgttctacatgggtgtgtgcgggaagtcctgacaagcctttaggtggagcctgtggcaatgcaacaagcagtatcacttgtcaagtgctgtccctgctctaatgaaacatcagatacgtgtttaacattgaccaagacctgcatggacctaacattcaatgatcattcagtattaagaaaaggttaaactgctagagacactaggttgcttctgtagttttctcacaaagggagggtgtgggagggaggcatatgggacattgaaaagcgaatttaatgactgccttctacattactgtgtatgtgtacatatttgtttttttttattgttattttaaaaaaactgaattgtttcagtaaaattgcttcaagcatttgtaagttatttttacgttggggttcataaacccactattttctgtaaataagagatattgagcactcttgagtttaccatttgtaataaagtataatttttctatgtttttgtttctaaaggacaattccagacgtctaattatatttaagatattaaataaaagatgtggaaattagattgtttttttaatttatatatatttttttttacattgcaataaacgtgcatgttaaaacataaaaaaaaaaaaaaaa

SEQ ID NO: 20 - DNA, 1045 bp, Xenopus laevis
tgagtctgagccgctgccgctcattgaggtcagagcaagttgtgtccgtaaagctcacgggaggctcgtgctctgtttctgaggtgggacatggcggctggattcaagacggtggaacctttggagtattacagaagattcctgaaagaggcttgccggccggatggacgagaactcaccgagtttagaacaacaaccataaatgttggttccattaccacagcagacggttcagctttagtgaagcttgggaattgcactgtactgtgtggtgtgaaagcggagttagcagctcctccagcagattcacctgataaaggatatgtcgttccaaatgtggatcttacgcccttgtgttcatcacagtttcggcctggccccccaggagaagaggctcaagttgccagtcagttcatggcagatgtcattgacaattcccagatgctcctgaaagaagacttatgcatcgcacatggcaagctagcatgggttctgtactgtgatctcatatgtctcgattacgatggaaatcttcttgacacttgcatgtgtgcattggttgctgctttacagaatgtaaggttgccatctgttaaaataaatgaagagactggtttagcagaagtgaatttgaaaacaaagtgtgccctgaaaatcctgaaacacccggtagctacgtcgtttgccctgtttgatgacacatcccttctggtggatcccacaggagaagaggagagcttggccagtggactactcactgttgtgactgatgaagatgaaaggttatgtgccactcgaaaaccaggtgggagtgcactttcggcagagaagcttcaggagtgtatcagtcgggccatcaccagacacaaagaagtgacaaaccttctgcaagaggcactggccagtgtcaagtcagaataagtagtaatttgtcattttaaaatgaacatgtaaaaagttgtatttgttacagtgattgcccaccttttgtactaaataaaacaataccaggactacaaaaaaaaaaaaaaaaaaaaaaaaaaaa

SEQ ID NO: 21 - DNA, 2813 bp, Xenopus laevis
ccgcacgtgacggggttcttgctgcagcggcggacttggagggcgccggtgtgctggggaggctgagtcactgtgatcatggatctgaaatggtttctgttagtgactcttctggtgcttggtgtagtaacaataaatgctcatgaccatcacgaccgtgaccacgatcatcatgaccacgatcatgaccatcatgaccacgatcatgaccacgaccatgatgatgacgatgggctggacattgatgatgacctagaaaatcccgaagaattaaaaccagagaccagcctgcctcctcctgctcccaaggtgacttacaaagccccggtcccaacaggagatgtctatttttcagaatcatttgacaaaggaactttggatgggtgggttctttccaaagccaagaaagatgacacggatgaagagattgccaaatatgatggtaaatgggaagtgacagaaatgaaagattcaaatctcccaggggacctaggccttgttctaatgtcacgtgcaaaacaccatgcaattgtcagcaaactgaagaagccctttgtctttgataagaaatctttaatcttacaatatgaagttaattttcaaaatggaattgaatgtgggggtgcatacgtgaaactactttccaaaactcaagaacagaaacccgagcagttccatgataagacgccctacactatcatgtttgggcctgacaagtgtggtgaggattacaaactgcatttcattttccggcacaagaaccccaagactggagaatatgaggagaaacatgcaaaacgaccagatgcagacctaaaatcttacttttcagacaagaaaactcacctttacaccctagtcttaaatcctgataacagctttgaaatcctggttgatcaaaccgttgtaaatcgtgggaatctcctaaatgacatgaaccctcccgtgaatccccctaatgagatagaagatccagaggataaaaagcctgaagattgggatgagagaccaaaaatatcagatccagatgctgtgaaacctgatgactgggatgaggatgctcctgccaagatcccagatgaaagtgctgtgaaaccagaaggctggctggatgatgaacctgaatacacttctgatccagatgcagagaagccagaggactgggatgaagatatggatggagaatgggaggcaccacaagtggcaaatcctaagtgtgagtcggctcctggttgtggagtctggcagcgacctactattgacaatcccatgtacaagggcaaatggaagtctccaatgattgataatccagactatcagggtatatggaaaccaagaaaaatcccaaatccagatttctttgaagatctagaaccattcagaatgactccattctacgcagttggccttgaactgtggtctatgacttccgatattttctttgataattttattatctgctcagagagaaatgtggctgatgactgggctaatgatggatggggcctaaaaaaggcagctgatggagcttctgcgcctagtgtagtgggacaaatgataactgctgcagaggaaagaccttggctctggattgtttatattctgactgtggctctgccagtttttctggttatactcttctgctgctctggaaagccattggatgcagaacacaaaaagactgatgctccccagcctgatgtaaaagaggaggaggaggaggaagaagaagaaaaagacaataaggctgaagaggaagaagatgctgaagaaagtgacacgcaaaaaccaaagcaggatgaagatgaaggtgatgaagggcaagaaagccaagaggaagaggaggcagaagaggagatcaaacctaaagaagacgacattatgaacagatctccaagaaatcgaaaacctcgaaaagattaagaaaacaaatatattccaaatccaccaatggacttgaacatttggcagaagttaatataaaaaaaaaagctttctgtttttacagagataaataactatccaggaacattgtaacactgaagtccttgtcacccacaagtcgcagccgagaactcgcatcattataccacgtatctagatttgtaaacccaagtaatgaaaaagcatcatttctataatctaaatgcatttaacactagtcgacttcttggtgggatatgcagtgtaacatgaagaactaactctactctttttgtttgtttttgtttttttttaaattaaaactttttaaactgaagaaagaaatctagtattgccaaactcttccatacttcagtgtaatgaaatgtattaatcctagaaaataaaatcagaagagagctttaggaaatgttagatctaacaagcatttattttttttttaaatttgtttaatggctgcttggtttggtgttcattccttccagtttaaagtaacccattttgctgtttttttgtttgttttacacgagtatttacaagacatgcttttggttctagagagcatggtcagtagtcctggcaacatgcatgttatccctggttaccgttaagccgccagcacttgaagtctttatggaccaaaatgctataatcgcccagtaaacagatgtctcggatacctctaaattacgtgtgtgctcccaagtgtaaatatattcatatagaacatttgctttgtgtgcatactgggttccacagtcagtccctgtttatttttctctatgtttttttgttttgtttttactgaagctgtaactgttcccacatctttatttaaagcaactttgctgtttaaaaaaaaaaaaaaa

SEQ ID NO: 22 - DNA, 5074 bp, Xenopus laevis
gggagcgagcagccctgacagaaaagaatgacccatacagcggcagtaggcccagcatcttgggagctctctgtaaaattggatgagcagaatggagttgagccccagaaggtaaagataagagtatctggagatctgcacattggtggggtcatgcttcgacttgtagaacaaatcagggtatccaaagattggtcagattacgcactgtggtgggaacaaaagaattgctggcttctaaaaacccactggaccctggataagtatggagttcaggccaacgccaagctgtttttcacccctcagcacaagctcctgcgtctccgtctgcctaatatgaaaactgtcagactgaaagttagcttttcggcggtggtgttcaaagctgttgtcgaggtctgcaaaatactgaacatcagaaggcctgaagaactgtctctactgaaaccctcggatgactatgtgaagaagaagaagaaaaaggataacaaagaatctgtgctagatgaagttataaatttggagagcccaaacagtaattctggatccttaccaagcccaggattatacagcaaaaccatgactcctatgtacgatcctgtgaatgggactcctgcgtcctccacaattacttggtttaccgatagcccattggctgagcagagttgcaacatcctagccgccagccacccaaacgaatcgctcgatatactcgcacagatgtaccagccacggacattgatggaaaaaacgaggttaagctcaggatggttagattcttccagatccctaatggaacaaggcttccaagaagatgatcaccttttgctgagatttaaatactactcctttttcgatctaaatcctaaatatgacgctgtgaggataaaccaactgtttgagcaagcgcgttgggctcttctgctggaggaaattgactgcactgaagaggaaatgttaatgtttgctgcattacagtaccatattcacaagctgtcattatcggctgatgcttttgagtcaacaacagacggggaaacagacgaaattgaagctgctctatcaaatctagaagttgcactagaaggagggaaaatagacaaattactggaggatatcacagacataccaaaactagcagataatctaaagctttttaggccaaaaaagctaacattaaaagccagcaagcagtactggtttgtttttaaggacacgtccatatcctatttcaaaaataaggaagctgcacatggggagcccatcgagaagctaaatcttagagggtgtgagattgtaccagatgtcaacgttgcgcagaagaggtttggaattaaattattaatcccatttgcagaaggaatgaatgaagtttggttaagatgtgataatgaatcccagtatgccaaatggatggcggcctgtgttcttgcttccaaagggaaaacaatggcagacagttcctttcgacctgaggtccacaatatactctcctttttaaagctgaaaaacacaaataccaattctcaagtgccatctgatatagaaaacgtggacatcaaacccgagtgctttgtttcaccacgatattcaaagaaatacaaaagcaaacagctggctgctcggattttggaagcacaacagaatatagcacaaatgtctcttgttgaagccaaattaaggtttatacaggcatggcagtctctccctgaatttggtttagcctactatattgtaaggttccgaggcagcaagaaagatgatttgcttggcgtgtcacacaaccgactgataaggatcgatattgcaacgaaagaccctatcacaacctggagattttccaacatgaaacagtggaatgtaaactgggaaaaacgagaggttgccattgaatttgaccagaatatttctgttgcatttacgagccaaagtgcaaattgcaagattgttcatgagtacatagggggatatatttttctgtcaactcgttcaaaagaccaaaatgaaaccctggatgaagagctcttccataaattaactggaggtcaggagtgaggaacaaagacatcaatccaagttcaaagacttgccagataatgagcatttcaatgtattataaatattactgctccagcactggaaatgtcagattttgattataattcatgtgaatactttgtttttattagccgctggaatccagagcaaaatgaatccttgagccctgctatagttctatatgcagctggattctacaagaagaacactcagggagggccacattctcaattatatatgaatatgtaaacggttacatattgcgtcaggacttatgaatcctaaaaatactgggctgtgcttcagcagactgtgaggaagcagattgtctatgcgcttttcacttcctgctcagaagtctgtaaagcaaaaacactaactccagactgatgacgtagcacgggaaaataaatattggtcggttccggctgcattatttgtccttgtaaaataaactactcaacaaaaaaaaaaaaaaagggagcgagcagccctgacagaaaagaatgacccatacagcggcagtaggcccagcatcttgggagctctctgtaaaattggatgagcagaatggagttgagccccagaaggtaaagataagagtatctggagatctgcacattggtggggtcatgcttcgacttgtagaacaaatcagggtatccaaagattggtcagattacgcactgtggtgggaacaaaagaattgctggcttctaaaaacccactggaccctggataagtatggagttcaggccaacgccaagctgtttttcacccctcagcacaagctcctgcgtctccgtctgcctaatatgaaaactgtcagactgaaagttagcttttcggcggtggtgttcaaagctgttgtcgaggtctgcaaaatactgaacatcagaaggcctgaagaactgtctctactgaaaccctcggatgactatgtgaagaagaagaagaaaaaggataacaaagaatctgtgctagatgaagttataaatttggagagcccaaacagtaattctggatccttaccaagcccaggattatacagcaaaaccatgactcctatgtacgatcctgtgaatgggactcctgcgtcctccacaattacttggtttaccgatagcccattggctgagcagagttgcaacatcctagccgccagccacccaaacgaatcgctcgatatactcgcacagatgtaccagccacggacattgatggaaaaaacgaggttaagctcaggatggttagattcttccagatccctaatggaacaaggcttccaagaagatgatcaccttttgctgagatttaaatactactcctttttcgatctaaatcctaaatatgacgctgtgaggataaaccaactgtttgagcaagcgcgttgggctcttctgctggaggaaattgactgcactgaagaggaaatgttaatgtttgctgcattacagtaccatattcacaagctgtcattatcggctgatgcttttgagtcaacaacagacggggaaacagacgaaattgaagctgctctatcaaatctagaagttgcactagaaggagggaaaatagacaaattactggaggatatcacagacataccaaaactagcagataatctaaagctttttaggccaaaaaagctaacattaaaagccagcaagcagtactggtttgtttttaaggacacgtccatatcctatttcaaaaataaggaagctgcacatggggagcccatcgagaagctaaatcttagagggtgtgagattgtaccagatgtcaacgttgcgcagaagaggtttggaattaaattattaatcccatttgcagaaggaatgaatgaagtttggttaagatgtgataatgaatcccagtatgccaaatggatggcggcctgtgttcttgcttccaaagggaaaacaatggcagacagttcctttcgacctgaggtccacaatatactctcctttttaaagctgaaaaacacaaataccaattctcaagtgccatctgatatagaaaacgtggacatcaaacccgagtgctttgtttcaccacgatattcaaagaaatacaaaagcaaacagctggctgctcggattttggaagcacaacagaatatagcacaaatgtctcttgttgaagccaaattaaggtttatacaggcatggcagtctctccctgaatttggtttagcctactatattgtaaggttccgaggcagcaagaaagatgatttgcttggcgtgtcacacaaccgactgataaggatcgatattgcaacgaaagaccctatcacaacctggagattttccaacatgaaacagtggaatgtaaactgggaaaaacgagaggttgccattgaatttgaccagaatatttctgttgcatttacgagccaaagtgcaaattgcaagattgttcatgagtacatagggggatatatttttctgtcaactcgttcaaaagaccaaaatgaaaccctggatgaagagctcttccataaattaactggaggtcaggagtgaggaacaaagacatcaatccaagttcaaagacttgccagataatgagcatttcaatgtattataaatattactgctccagcactggaaatgtcagattttgattataattcatgtgaatactttgtttttattagccgctggaatccagagcaaaatgaatccttgagccctgctatagttctatatgcagctggattctacaagaagaacactcagggagggccacattctcaattatatatgaatatgtaaacggttacatattgcgtcaggacttatgaatcctaaaaatactgggctgtgcttcagcagactgtgaggaagcagattgtctatgcgcttttcacttcctgctcagaagtctgtaaagcaaaaacactaactccagactgatgacgtagcacgggaaaataaatattggtcggttccggctgcattatttgtccttgtaaaataaactactcaacaaaaaaaaaaaaaaa

SEQ ID NO: 23 - DNA, 2148 bp, Xenopus laevis
ctttcactggttgagaggttcagagacagactgagacgccggcctttggatttctgcactcatggcacagtttgcttttgaaacggatattaatagtatcttaaagctggatacacccatcacaaatgcccctctagcaagatggcagcggaaagcaaaggagggtaactgctcattgaatacttcagcaaatacaagtactatgtctccaatgaaaacatcaaaccgatcccacagttccagcaaaactccatcaaaaacaccaggaaaatctgggcaaaaaatgcaaggtacgccttccagagctggaggtgatcgtttcattcccaatcgcagtgccatgcagatggatgttgctagctttcttctttctaaagagaatgagccaacagacacttcacccacaaaaaaggagcagcaaaaagcatgggcgatgaatctcaatggctttgatatggaagaggcaaaaatcttacgacttggtggtagacctcaaaatgctcctgaaggctatcagaataacttgaaagtgctttacagccaaaaaaacacccctggttccagtaagaaaactggcagatatataccttccatgccagacagagtcctcgatgctccggatatccggaacgactactacctgaacctgattgactggagctctcagaatgcccttgctgttgctttaaatgactctgtttacctttggaattatgcaactggagacataatactcttgctacagatggagaactcggaagaatatatatcatctgtgtcatggatcaaagaaggccatttccttgctgtggggacaagtaattcagaagtgcagctatgggatgttcagcagcaaaaacgtcttcgtaatatgatcagtcattcgtcgcgtgttggagctttgagttggaataaccatattctttccagtggttctcgaacaggtcatattcatcaccatgatgtcagagtagcccagcatcatgtatctaccctaacgggtcacacacaggaagtttgtggccttaaatggtctccagatggccgctatcttgccagtggagcaaatgacaacttggtgaatgtatggccttgtgttcaaggagattcaggggagttttcaccagtgcaaacattcacacaacatcaaggagctgttaaggctgtggcatggtgtccatggcaatccaatgtgctagcaactggtgggggaacaagcgaccgacacattcgaatctggaatgtttgctctggaacctgcttaaattctgttgatacccattctcaggtgtgttctatactatggtctgccaattacaaagaattgatatctggtcatgggtttgcacagaaccagcttgtactatggaaatatcccactatgaccagagtgtcagaacttaaaggtcacactgctcgagtccttaatctagcgatgagcccagatggctgcacagtggcttctgctgctgctgatgaaacgctgcgattgtggaagtgctttgaggtggatccagtgactaagaaagaaaaggaaaagtcgcgtagcagcaagagcatcattcaccaaagcatccgataaacagactttgcttttggtttttaaactcgtgcataatgtatttttttttatgtatatatattctgaaataaagtcttaaaagatgtataatttacactatttgatactggagaaagaagatgaaatgtgaggcatgtggtctgtgagatgtctaacccattgccacttctgcacatatactggtgtaggtaactgcttgtacccggaccactgtagagttattaatctatcatttgtgttgtcttcctggcttttttttttttttaatttttaaagaggcatagttacactgcaatggaatgactgttaacctgtataactgtaatttgtgcctctgtatacttaacggatgaagcctagtggagtgttcagtgtagtgtctatgttgtactttctacacctttagtgcagtagtggtaataacaggcaatattcacttgtttccaaaatgcatgttttgtatgggtataattagtttcatgtccaccctcactaatgtttaaggctgtggttcaaccattgtaataaaactgtaaattataaaaaaaaaaaaaaaaaaaaaaaaa

SEQ ID NO: 24 - DNA, 2100 bp, Xenopus laevis
gtgggaactgctgagctgcgctgggagtatctgagtgattcgcactctactgggaccgagttgcagtctgaagatgaagcctgggaaagcaaaagacagttacacacagagagattttgtgtacaacttccaagctggacctcagaaatttgcactcacggtaccacttcagttcccggtccaagaaaaccttaatcacctgcatggacgcctcatgctgcttcacaacctgccctgctttgtagagaaagacctaaagcaatgtctgtgtcgctttgtggaggaagagacagtcaaggactacgacagagaggctgaactggccctggaagctgtgaggtcacctgaggtggaagcagagaaattagccaatacgtggatgaaatcctatacagagacaactttggaacatgcacgacccgaagagcccaactgggatgaagactttgccgacatttaccatgatctgatacattccccggcttcagagacccttctaaacctggagcacaattactttcttagcatctcagaactgctgagtgaaagggatgtggagctgaagaaattaagggagagacagggcacagagatgaacaaagtgatgcaggaactgggcaagtctctcactgatcaggatgtgaattcagtagctgctcagcatttcgaatcccaacaggtattagaaaataaatggggcacagagttacagcaattgtctaccatccaaaagcaagaataccaggagtgggttatcaagttacaccatgatctgaagaatcccaacaacagttccataagtgaagaaatcaaattccagcccaacagcctacaggagagtgcagataccagccgggaagcgtatgaagagcacaggcagctggaggaaagctttacaattcatttaggggcgcagctgaagaccatgcataacctgaggttgatgagagccgacatgctggacttctgcaaacacaagcgcaatcaccgcagtggggtgaagttacacagactccaaactgcaatgtctctgtattcaacgtcattgtgcggcctggtccttttggttgacaaccgcataaattcctatagtggcattaaaagagatttttccaccgtgtgccaggaatgtacagatttccagttccctcaacttcaggagcagctagaaatagttcagcaagtgcttctctatgcccgggcacaacgagagcagaagtctaagcatcagcatgacgcaaccaatggaaaccaagggcgtggtgataaagtcaaaggtgttgagcgcaaccaatcaaatttattaccaggggaattttacgtgactcgacattccaatctctctgagatacacgtggtgtttcatctctgcgtggacgacaacgtcagaagtgggaacatcacggctcgggatccggctataatgggactccgaaatattctgaaagtctgctgtacccatgatatcactacaattaatatccctttgctgttggtacatgaaatgtctgaggaaatgaccataccgtggtgttccaagagagctgaattggtcttcaagtgtgtcaaaggcttcatgatggaaatggtttcatgggatggaggtgtttcaaggactgtgcagtttcttgttccacagaatatatctgaggagatgttttatcagctcagcaacatgctgccgcagatcttcagagtctcctcaacgctgacgttgacctcaaaacgttgatgacacctaaaaagaggggatgaaagcaagagtgaactgaagcattatccatacctggtacaattttgtgattgagagcctccgtgcttaggaattacagaaatcaaaataacttttgatctgtgtgacaaactcatggcttcactttctgtgaccaggatcctccattcagatggaagggatggagatttatacaggacatacaatttccataaataacttaaagaacatattcacatatttctaaacggtgtagactgaaaaaaggttgtaaatgaactgccccattataatatgggtgcggatagaaagtgggatgtgaatataagcatcttaaaatgctaattacctagaaaaaaaaaaaaaaa

SEQ ID NO: 25 - DNA, 3942 bp, Xenopus laevis
aataactttttttttttacgtatatgttttatggtttttaacggaatccagtttgatttaaaaagaaatccattcttccgcagcgatagacagagtgagttcagcaagggcggagtagcggcagaattcggagtcatcttgctgccgcgtctaacatctgtccggggaagtcgcagacatgatcatagaggattttgaggcgttgaaacattggttgtcaaagactctagagccgatttgtgatgctgacccatcagctcttgcaaaatatgtacttgcattagtgaagaaagacaaaagtgaccgagagctaaatgctttatgcattgaccaacttgatgtatttctacaaaaagagacacagggctttgttgacaaactgtttgatgccataaacaccaagagttatcttccacaacctgatagcacctcaacagctgttgtgaaattggactcatttgaacatcaagaaaaagaaatcaagaaagatgaggtaaacaaagaagaagaaaaagaaaagaaggcacctaggagattaaaccaaagccctcagccttctagcacccgtcacaaagataccagggaaaacagaaaaagaagtaactccgatcgagaaagcaactccatacaaaattcctttagatcaggtctcccagagcagaagcaggatgtagatgcagcaccgccacgtttaaatagtaacaaagttcagaatgcaaaaaacacaaggagtagagatgatcgaaagagagatgatcgttttcgtaaaagggagtatgacaggaatgtacctcggagagattcgtacagagatcggtataacagacgtagaggtagaagtcgcagttacagcagaagccgaagtcgcagctggagtaaggagaggcagcgtgatagagacaggagtcgtagcagaacaagaagtagagacaaggattctggaaagccaaagtttgatcttgatagaccagatccagtagacaacagttatgcatcaggatcttctgttcctcacattggatctgcacattttccagttccaactctaagcagtacaattacagtaattactccatcccatcatggcaacagctcagctgaaaactggccagaatttcatgaagatcaagtggaccacagtagttatggcagactacagatgcagaaaaaacgatgcagagactatgatgaaaagggattttgcatgagaggggatatgtgtccttttgatcatggtagcgatccagttgttgtcgaagatgtaaacctacctggaatactaccattcccggcaccgcctcctgtcttagaaggacctcctccaccaggccttcctcccccaccatctcttttaacacctccccctgtaaacttgcaacctcctcctgttccgccacctggtccacttcctcccagccttccgcctgtcacaggaccaccaccacctcttccacctttgcaaccggctggtatggatgctccccctaattctgcaaccagttcagttcctaccgttgtcactacaggcattcttcatccacctcctgtgccaccttcttctctcttcccatccgcagcagcagcagcagggcccattcctttgtttccagagacatatgaagcagatgggtataatccagaagcaccaagcatgactactacatcaagacctctataccgccatcgtgtacatgctcaaagacctaatttgattggcctaacttcaggagatatggatttgcctactccacgagagaaaaacaatatgaggatagttgtggattctgagtctcggaaaagaaatcttggatcaggggattgtgttttaccttccaaaaaaccatggtttgacaaatcaaacttcaacaacagaatgaatcctggctttcaaaaaaagcccctgtttccaaatgaaaacactaaacttgaattaagaagaattccacctgaacttaacaacatcagcaaacttaatgaacatttcagtaaatttggaaccatagtgaatctgcaggttgcttacaagggggacccagaaggtgctcttattcaatttgctactcatggagaagcaaagaaagcaatatctagcacagaagctgtgttaaataacagatttattaggatgtactggcacagagaaggctcttctcagcaattacagactccaggcttgccaaaggttgtacatctgacagttccacaacaacccaatttatcagtcatgaagcaatctataaaggagcgtctaggaccagttccagcaaacaattcggagccatctgtggcccagaatattaacacagagaccattcagaatatagccaaagtacctgttaaagagagattgggttatatgtccaaaactgtttctgcagctacagaaaaggttttttccacatctacaggactcacaaaaacagtttacaaccctgcagctttaaaggcaatgcaaaaatcagttttgtatcctatttgcaatgataacggtgatgcacagaaaaaaaaacaggaagctctaaaacttcagcaagatgtaaggaagaaaaagcaggagatactagagaaacgcatagaaacacaaaagattcttatatcaaagctagagaaaaataagaatatgaagtctgaagacaaagcggaaattttgaaaacactggagactttgactaacagtattacaaaattaagggatgaactgaaagcagtttcttcaacaggcaatgtcgtaaagaataataaaagcaaagctcagatgcaaaaagaacttttggacacagagctggacttgtacaacaaaattcaagctggggatgatgttacagaactacgaaagaagtatactgagctgcagcttgacgctgcaaagcgtggcattctgtcatctgggcgtggccgaggagttcatttgagaggacgaggtgtgataaggggaagaggtcgggtattgcatggcagaggtagaggagcatctgtacatgccgtggtggatcatcgcccaagagccttaaagatatctggttttactgaaggcgacagggaatatcttttgccccactttgcacattttggtgaaatagaagactgccagatagacgactcttcacttcatgcaataataacattcaagactagagcagaagcagaagctgctgcagttcatggggcacaattcaaagggcaggatttaaagctagcgtggaacaaaccagtgccaaatgcatctagtactgaagtagaagatgctgatcaagaagaggaagaatttcacgaagactccatagtagatgactccttgcttcaagatgatgatgaagaagaagaggatgataatgagtcccgttcttggaggagatgagctatcttatctggtcactgggcatcagttgttgggtcatgccttcctgtatttttgtgaagaaatgatgtggactcttaggttgaaagccttctgatttgtcatttcagttaatgattgcacaatgcatcatgctatatacatatgcaatgtttttatcctgcacactgtttgccagatgtgaatttatttttttttttttggtttctttgaaatgtaagaaatttcaactgaaattcaaatttgtgtccttataacaaattgaaagtttgctttatagctatgaacatgttcagtcataagtagatgagtactaaacaaggttttctgatgttatgtacataatacatattgttatgcataggctttactatgtagtagcctttttgttcatttttgtacatattttaagtatgggttttaataacattgtatgactgctttgcatttaagtccctgtgactttaagatgttgaaaaaaaaataaacggtggaatggtctaaaaaagtaaacataaaagaaaaaacgcaatacaattttgtttgtagctaaagtgagtaaaagataaaaaaaaaaaaaaaaa

SEQ ID NO: 26 - DNA, 3489 bp, Xenopus laevis
tgaatgcgctctcagctcccggcttgtgccgcccgttccttgcacgtcgtcaggcctcgagtcttgtgcccgccctttcaagcctggaggaggccgggagcccggggagcagcagaacaggccacaaccaccgctctgtccccgcccacactgccccgggccggcctttgtttccggtgtttggagcgccctcttaccgccccttcccttactcgtttcgccgtctgacggagctttacccggagagtcgcataagaaagcccatggtcaagaagccacattcacacagatgaaccaggcgttgtggcagcaccgcaagcctagatagttggtcggcagactgctcaagcaggatgccgtcaacaagtcgagctggaagtctgaaggacccagatgtagcggagcttttcttcagggatgatccggaaaaacttttctctgatctccgggaaattggacatggaagctttggagcagtctattttgcacatgatgctcgcactagtgaagtggttgccatcaagaaaatgtcctatagtgggaagcagtccaatgagaaatggcaggatatcatcaaagaagtgaagtttctacaaaggatacagcaccccaacagtatagagtacaaaggctgctatttaagggagcacacggcatggctggtcatggagtattgcctaggatctgcatcagacttactagaagtacataaaaagccattgcaagaaatagaaatagcagcgatcacccatggggcattgcagggattagcttatttgcattctcataatttgatccatagggatatcaaagcagggaatattcttctcacagagccgggtcaggtgaaactggctgactttggctccgcttcgatagtatctcctgccaattcttttgtggggactccatattggatggccccagaagtaatcttagccatggatgaagggcagtacgatggcaaggtggatgtctggtctcttgggatcacttgtgtcgagttagctgaaaggaaacctcctctgtttaacatgaatgcaatgagtgccttataccacatagcgcagaatgagtctcccacgcttcagtctactgaatggtctgattacttccggaactttgtagattcgtgtctccataaaatcccacaagaccgaccaacatcagatgagctgctgaagcacatgtttgtcctacgggagcggccagaaacagtgttaattgacctgatccagaggacgaaggatgcagtgagagagctggataatctacagtaccgtaaaatgaagaagctgcttttccaagaggctcacaatggaccagctgtggaaacacaagaggaggatgaggagcaagaacacggagttggtcgaacaggaaccgtaaacagcattggtagtaatcagtccattcctagcatgtccatcagtgccagtagccaaagcagtagtgtgaatagtcttccagatgcctccgatgacaagagtgagctggacatgatggagggagaccatactgtgatgtcaaatagctctgtcattcatttaaaaccagaagaagaaaactaccccgaggaaccagatcctagaacgcgaccttcagaaccgcagtctcctccccaggtttcccgtcacaagtctcattatcgcaaccgtgagcactttgccaccatacgcacggcctccctggtgactaggcaaatccaggaacatgagcaagactcggaactccgcgaacagatgtccggctacaaacgcatgaggcggcaacatcaaaagcagctgatggcactggagaacaagctgaaggctgagatggatgagcatcgtctccggcttgataaagaccttgaaacccagcggaataactttgcagcagaaatagaaaaacttgttaaaaaacaccaggcagctatggagaaagagttaaagttaatggcaaacgaggaaaagaagttccagcagcatattcaggcacaacaaaaaaaagagctaaacagctttctggaatcacaaaagcgggaatataaactgcgcaaagaacaactaaaagaggagctaaatgaaaaccagagtacgccaaagaaagagaagcaggaatggctctccaaacagaaagagaatttccaacattttcaggccgaagaggaagccaatcttctgcgtcgtcagagacagtatctagagttggagtgccgtcgttttaagagacgaatgctcctgagtcgacataatttagagcaggacctggttagagaggaattaaataaaaggcaaacccagaaagatctggaacacgccatgcttttgcggcagcatgaatccatgcaggagctcgagtttcgccatctcaacactattcaaaggatgcgctgtgaacttataaagttacagcaccaaactgaactcacaaaccagctagaatacaacaagagacgggagcgggaattaaggcgaaagcatgttatggaggtccgacagcaaccgaagagtttaaagtccaaagagctgcagattaaaaagcagttccaggacacgtgcaagatccaaacccggcagtataaagctctacggaatcacctcttgaaatcgactccaaagaatgaacacaaggcagtgctgaaacggctgaaagaggagcagactcgcaagttggcaatactggctgagcagtacgaccatagtatcaatgagatgctctccacacaagctttgcgtctagatgaggctcaggaagccgagtgccaggtcttgaagatgcagctgcagcaggagctggaactactgaatgcttatcaaagcaaaattaaaatgcaggccgaggcccaacacgagcgagagatacgtgagctggaacagagggtttccctgcgaagggcccttctagaacagaagattgaagaagaaatgctggctttgcagaatgagcgcactgagcggatacgaagcttgctggagcgccaagcccgggagattgaagcttttgactccgaaagcatgaggctaggctttagcaacatgatactttctaatctctcccccgaggcgttcagccacagctacccgggagcttctggctggtcccataatcccacaggaggccctggccctcattggggtcaccccatggctggaccaccacaagcctggggccacccaatgcaaggtgggccgcaaccatggggtcatccctcagggtctgtgcaaggtgtctctcgtggtagtacgatgggggtccgcaacagcccccaggctctgaggcggacagcttctgggggacggacagagcagggaatgagcaggagcacaagtgttacttcacagatatccaatggctcacacatgtcttacacataactcaaagaaaaactctatggccattccttatgatctttcaacacaaactgcctagagatgtcctcacaacagcttcctcattggttaatgagcagctgccaaaaagaaaggagaaaaaaaaaaaaaaaaa

SEQ ID NO: 27 - DNA, 3917 bp, Xenopus laevis
cagagaacgagctgctggcggatatacaggcaccagctaagctttaggtgtatttcagacttcttcgtgatgccaagacggatgctaatgcctcacaagtctgttttctcttactcccgccccccaaagtggctgaatggtggccacaacatgaactcagccaggtgtggataccgtgtcttctccgccaactccagcgaggcctgcatggaactggccaaaaaaattacagagcgcttgggagcacagttggggaaagcagttgtataccaggaaagtaatggagaaaccagagtagaaatcaaggaatcagtccgagggcacaatatcttcattatacagacaattccaagagatgttaacactgcagtaatggagcttctgatcatggcatacgctctgaagacttcctgtgccaacaacattatcggagtgatcccatatttcccgtacagcaagcagagcaagatgcgcaagcggggctctattgtatgcaagctgcttgcttcaatgatgtctgacgcagggcttacgcatataattactatggatctgcaccaaaaagagatacagggcttcttcaatttcccagtggacaacctgcgagcctccccctttctactacagtacatccaggaagagatccaaaactacaaaaatgcagttatagttgccaagtcgcccgatgcagctaaaagggcacagtcttatgcagaacggctgcgcgtgggccttgctgtcatacacggggagccacaatgtggagagcacgatatgttagatggacgccattctccacccactgtgaagaacaatacagtgcacaaaggactggagattccctgcaagcaccagtctccgtttccaggcattgaactgccaatgttgatgcccaaggagaagccacccatcagcttggttggagatgtacatggaaaaattgccatcattgtggatgacatcatcgatgaggtagagagttttgtggcggcagcagacattctgaaagaacgtggagcctttaaggtctatgtgatggcgactcatgggatcctatcctctgatgccccgcgcctgttagaactttcagctatagatgaggtggtagtgaccaacacaataccacatgagctccagaagcaacagtgttccaaaatcagaacagtggacataagtatgatcctctccgaggccattcggcggatccacaatggagagtctatgtcctacctcttccgaaacattgcactggatgactgagcgtgctgctctcctcagagcgccacgcaggcacgtgaactagttgggccggagtttagcagtgcaccagcctcagtgtaccacgatgtttgaagtttttacactatggcaaaatgccacattctggaaggcgaatgcggagcatgatttggcaacccgtctgcagggcggaaagtgaattgcaactgtctgggttggatttttaacagttggaagcatgagctgcaatgattccctttgtattagctggagtatgtgtggatgggctaacccctgtcatgtcagaggtacagtggttaggcttgtggcagtcaatgctgttctcagtgtcacagaataggagatgcacagaatacataacatctgtacacgcagcacatgtaagctgtgtcatgcatgtgctggcatgctcattcccatatgtactgtacatactgctaaacacgcaatcatggagaaacaggcacattcaaactcttcgggtgcactacacatgatgtcatgcacatactggatttgcgtgtctttgtccatgtgaagcagacacacacaaagctattttcgggtttctttttttatttgaaaatatatgtatgtagggatatacatattcatgtctgctcgttgcatgcacatacataaaaatcttatgtataatgcatatatgctgtacacacggagctgcaaagtggtctgcattttacagcatttatgtaaagtgggccactaagcattcagagattggatattatactcatgtccttccttttgagccgtcccaacggaaagctccagtttcatatcctttgcttttaagctttcccatatggtcagaccaacattctgcacaaatgacactgtgacagcagccatctttaatgctggaaactttggcaataacttatagaaactttgctccttgcagcttctttaaactaaaacccttaaccacagtttaaggttgattttgtttttcccatgtttccctcgtgtggcattgggagtaagttgctctctctgtgccagggggatctacggttccttcctctgcaaatatcgcttccaaacagcactgtgattatgttgtttactcgaattggcagacgattgaagatcccgagaggatgtctgatttatgcaaacgttccttttctattggttttattactataaggatgctttgttttcctggtctcagatgttgtattcagagttgtttatttttaattacaagttgaagaaaaggaagaaaaaaaaaaacatctgagcatcttttgtggtctccttattactggttacatgacagcaaaggcagctgcttgccatctcaatgggggtggtcactgtatcccattaaatatgcagcctgggatgatgtgtatgcctcaagcatctctgtgcttatggttaaaggtttgtcctaatcactttcctacagatcccaacaaggaagggacagctttgctagtagggttgtccgcacacccttttgaaactagcatgtatcagattcacatgcagcatggctcattctgcgattaattcatatttttatagttaatacttattatagacatacatccagagccttgtatacatattccaggctgctaatgaaattcgccatgccgtctcgatcatctgataaggttaggtttcttagatacaagtgtagatcgcttatttcagacacgtgccaaagattatagtaaacatatgcatttatacccgcataatataaaaacactttcaaacgaaagcagaaaatgttatcttatccttgcatatcttatccttgcatatgtcccaggctctaagccaagagattctatgttcagttctgtttacaggcactcagcacaaacaaaatctatgcactcactgaaaggaaaacaacccttacccaaattaacctcctaatcgctaattcacttgatctacacaccatctacttttaatccataaaactgatcacaaagtaacaatgattgctggtgggatcaatgagaccccaacaatttgtaactgcttaaaaggggtgtaaaaccaaaaaaaaatgtttgcctaatgaaaagaattgtaattctaagcacttttccccatatacattcatgacctatgttcctggattcaaagttacgtgcaaacataattgctacccatagcagtatctgtcactgcctttttgttttctgccctgctggttctgactttttaaaaacgttgtagaagaacttgccagttgattaagagacctaagaaaatgcattcaaagctgcagcgtcatgcagatactgctttcaattacatgtacaattagctttaaaaacattggaaatgtgtagataacagattgcttgcactgaaggttacttagcattatattttcattaatttggcaattttaggatgggtttacatcccctttaaactgcaattccagagctgtataataaaatgttgcatatttttttaaaaaaactaaaaccatctgaaatgggcttacagtatcattatcttcatccacagaataaaggtgaaattggggatttttgaccagcatgagtaaatctggcctctccagtcgctgaattatccctctgctaagtgttatagaccttaaaggggacccgttacccaaaaaaaaaaaaaaaaaa

SEQ ID NO: 28 - DNA, 985 bp, Xenopus laevis
attgagccgaacttttgttctcattgatacgggccagtcttataagaaccagaagcttccatggctttacagggagacgatgatttctggactcctccctctgaatcggaattgaagattctgagagcgcgacgagagcgtcaggaccgaatcagtcgtctcatgggagactatttactgaaaggctacagaatgctcggagacagttgtgattcgtgtgggacgattttactacaagacaaacagaagaagctgctgtgcgtttcttgtcaagaacttgattcggatactgagaaggacaatccagttctcaatcatcaggcagctctgtctcaggtgcgagagcatcagctttctctccagacttgccaggaaaatcctccggcccaagaagcacaatctgtttcaatcccaaaaccaaaggctgattctcctccaatcaagtctgatcctatcttgccaaatactgatgccatcgtattggccgaaagtgctgtattggacaagctttgctgggcatctcaccagctccaaacaacctcctctgtggagttcagctcacagctttgtgcacttattggctcttgtgcacagagtttgcgctttctccgtgacctcaatcactgatggacatataattccctattccatcaccccaaaactcccctattccatcaccccaaaactcctcttccactgaaacaagctgtcatggcaatgggggactggtatttgttgtaaacggataccattctgaccaatggctactttatgttcagcatcaccaggttttagaattgttactgtgcaaatagactcccataacatgttctttcactgtgttttagttgacctgaaagtgaatgaaaagagatttgggtcatggttttcctatatttaaaaacagatctcttgcctccgctgtttgcaaaaattgccgcatagataaataaaggtatttaaagtggtaaaaaaaaaaaaaaaa

SEQ ID NO: 29 - DNA, 3276 bp, Xenopus laevis
ggtggcttaagtgtggaaactgcatggagctgccgggcctttactagtgcagcgtgatccagaccagatcactaagaaaagccaaaatgcatcacttaccatcagctacaatccacttgctttccagttcccaagtaattacctcagtggttagtgtggtaaaggaactagtagaaaatgccttagatgctagtgcaaccagcattgaaattaagttggaaaattttggatttgacaaaattgaagttcgggacaatggaaaaggtatcaaacatgacgaaacctctgtcatgggcatcaagcactatacttctaaaattaacagccatgaagacttggaaacattagaaacatatggtttccgtggggaagctctagcttcaatctgctgtgtggcagaggttcatattactacgaagactcttgcagatgagttcagcaagctgtatgtcttagatagcagtggtcatgttgtttcccaaaagccttcccatcttggtcagggtactactgtcagtgtgcataaactgttcaagaatttaccagtaagaaagcagtattattctacaaataagaagtgtaaagaggagattaaaaagattcaagaactactgatggcttatggaatcataataccagatttaaggattcttttcacccataataaggctcttgtctggcaaaaatcaaaggtgtctgaccataagatggcatttatgtcagttgtgggaagtgccaccatgaatggcatggttcctttccaataccagtctgaggccccagagatttctattaatggctatctacctaagccagatgctgatatcactgtaaccagcctttcaagttcagaaaaaagtttcctatttataaaccgtcgacccgtgtatcacaaagaaataatgaagatggttcgattgtatcatacccagagtctaaacaaagggtcccctcgctgctatccagtgttttttatgaatattgtacttcctgcctcttgtttggatgtgaatttaactccagataaaactaagatcatgcttcaaaataaagaatctgtcctacttgctgttgagaatgtcctgagatctgtgtaccctgattcacaaattctagaaactgataaagataaaatgcctgaagacactgtaactcataacacagataattctaatacacacgttgttgaaaacaaaatcacagggtgtggtgggaaatctcttagtgtatgcccctcatttttaaacagtgttcaagaacaaaagcaatctgtgaactctttgcagcctcaaacgtttaataaggatactattttttattctgataatgctgaagttgcctacagtgagaatgagacctttgatggttttctggtgcctactgaatcttccaatacacaggatgaagccattgctgacactggattacattttgctgtcagtcacagtaattcaatggatactgagtctttaaaccctattgattctgtgcaccaggtttcagaaaaagatacatttaaaaaaacaacattgattaatgtccctgatatagttgatgacatttggagtaaaggaagcgcttttaaagactctctaggtgataacctagaacctgtaaagctactgaatttgtccacagagactcattttgacaaaaacactggagaagctagtaatgttcagaattcaaaggatacaaataacaaactgaatgtcattagtggaaaatctggatttgtcactgcctatgacttgataagtaaaagagcgatcaagaaaccattgtctgcagaggaacatttcattcaggcagaacggtccaaacttattgatgacaacccactggctagtgttgaagagatttcttcaaaagggaaagatctctggggtaaactgaatcaagaagagaaattcaactatgaagaaaaagcagctaaagatttggagaggtacaatctgcagatggctacggcaacaagagaacatgttgaaaagcaaaaagactcagagaaaagacagaaaatgtcatctagacctagccctactcgaaaagtaacattaaaaacaccactttctaaccagcaaatactggacaagttattccagtctcaagaaaagaaaaaaagcaaacctccaattagtagtgtacaagtagcctttaaattaagcatgttgaaacaacggatttcaaagctcacaaacccacaaaattctgtggaagaagacttttgcttgattaataagctcagcttccctggtgcatggattgtagcatcaaaatcaaagattgctcttctgaatccctatagggcagaagaagctttgatatttaaacgccttttaaagaaccataaaatacctgcagaaaagttggagtctccaattgtattaacagatagcctcttaggagggtctccgtatttagatgctctgttgagtatgcaaaaagatcccccaaagctgaatggagaaacatatttttcagatcccagacttactgctaatgggtttttgattaaaatagtgccagggaagtcagctgttgagaaacacattgagatagaagggatggctagcagcttgcctttttatggagtctcagatctaaaggaaattttaagttctgtaccaattaagaaaagcaatgagctatgtgactacagaccaattaaagtgtggaattatcttgagggagaagctgtaagattgtctcgccagctacctttaaatctttctaaagaagatgtgcaggacatcatgcacagggtaaagaatcaacttggaagtgaaactaaagcttgtctccatggtcatcagttttttcatcatttatcagacttgccaaaaactgaagagccatgttgatgctgtacactgtattataaaacatgcattgaataagcgccgttcagttcactgccaaaaagagcaccatcaaatatgagagagagagcaatttctacctaagtgctgcaagtatgaaagcaatcttttgttttactttatttttaacttaatagcattttgcattctgtttcacctcatgagttcaataatcatgattcatgtttactgactaatttcaggatagtgtaacatttttgaagatatataaataaattgagtgacgaagatctattctgcaaacagatgctgttactacatttgacattttttacacttttcccatggatgtggcaacagagagtgacattctaaacctataatgtaatagcgtatacgattaaaattatctacatataaaaaaaaaaaaaaa

SEQ ID NO: 30 - DNA, 1916 bp, Xenopus laevis
taatagtcgaagttatagtttgtgccgacacctgttgttggagccgcacggcatttgcgcccctaagggctcccttcatccgttacgaacatggcggacgacgtgagtgagttcctgggccagaaccctgaaacagctgcctggctggagcttgtccacggggagtgcgagtcggacaagttgtggcggtaccgtaaggaatttattctacggaacctgagcgatgtgtgcggggaagcagaggtcccgccgccccctgagaccaaccacaaggccttggaccgactgctcgcctactctatggtgtgggccaatcacgtgttcacgggctgcaggtacccccttccagttatggaaaaagtgcttaaaatggcagaaaatattaaggtgactgatgcaccaactcatacaacacgcgatgaactggttgccaaggtgaagaaaagagggatttcaagtagcaatgaaggggtagaagaggaaccatgcaaaaagcaaaaatccagtgatcatggggaaagagaaagctcttatattgaagacaccataagtgatggtaatgttccatctactagtctaaataagagagaggcacgcttgagtgcagcacaaaggacagatgtaaacacagaattttacgacaagtcaagtaatcgccggtctctgcctgtgtccaatgctaaatctagattgaatctcccagaagaagcaggatataaacatggtgctactcaggggagaaaaagccattctgacattcgacatcaaacatcaatgaaaggtccagcacaatccagcgataatgctctcaaacctactcgccgtttcactacagaacataccaaggaaaggcagcctttctttaacagactctacaaaacagtggcttggaaacttgtatctgctgggggtttcaatgccaacctcaaccatgaagaactacttaacacctgtattgaatctctaaaggcgactctagaggtttcttttgttccactgacagacctggcagatttaccccaaaacaaaacctctcaggagaatacagtttgtgaattaaggtgcaaatctgtttatttaggtatgggctgtgggaagacaatggagaccgccaaagctgtggcttcccgggaagctgtaaaactgtttctgaaaaagaaagttgtagttagaatatgcaaaagaaaatttaatggtcgcgacgtggaggacttggtacttgttgatgaggaatttcggcctgttaatttacctccagcaataaaaaaccctcaggaaattgtgtaacagatttctttgtttggtggaaagaaaattaaaaaggactgaatactttgtacttattaaaacatcaggttttttatttgaaatatttgtatttatttttgagttttactagggacataccacatacattctgcatgtggtatgcattctgcttcaaagcataatagctgttattggattgccttaaattgctatttggggttttatggaaaaatcattggtatgattttagtatgatttttttaattaaaatggtctttaaccttgtaaatgatcgcaatccataagtgtattgcctatatcctttgtatgtttagtctcctgcaaacaaagttgaatctaatttaaaatcataataaaaatctaataattgatctctttaacactgtaaccaagcagtggtttaattcatactgcaaagtaggttggcaatggtaaaagaaaaggctggttttgttgtatgtacttaaaggggaactccagcttccaaaccaaaattttataaagaggcccacataacacagatacccctaatatacccatcatagttacctgtttcttcaaaaggtatgagtaaatgccattttatatgctgaaaaaaaaaaaaaaaaaaaaaaaaaaaaaaaaag

SEQ ID NO: 31 - DNA, 2417 bp, Xenopus laevis
gtaaccatttggttctaggcagcatcaccctttcacgtgtcagtcgccacggagctgctttgtacttccgcgttcagagatcgcttggttaggactggaaggagttgtagctgatggccgattgaacctgtagctcagagacggagggaaagggatacatgttgcaaaggcaggatgttggactttgcgatatttgccataacttttctactgattctggtgggagctgttctgtacctttacccgtcttccagacaggcatgtggcattcctggccttgctccaacagaggagaaagatgggaatctacaagacattgtgaacagtggcagcttacacgagttcctggttaatctacatgaaaggtttggccctgttgcttccttctggtttggacgacgacttgttgtgagtttgggatcgcttgacctattaaagcaacacatcaacccgaataagacttccgatccatttcagacgatgctaaaatccctgttggggtatcagtccggtgttattggggaagcagctgagagtcatgtgcagaaaaagctctatgagaatggcatcaccaaggccctacatagcaactttagtgttataataaagctctctgaggaattgttagcaaagtggggtacttacccccaatcacagcatgtcccgctgtgccagcatatgcttgggtttgccatgaaatctgttacccaaactgcaatgggcagcagctttgaagatgatcaggaagtgatccatttccgcagaaaccatgacgctatttggtcagagattggaaagggttttttagatgggtctatagaaagaagtcccagtaggaaaaagctttatgaagatgctttgatggagatggaaactgtgctgaagaaaactataaaggagcgtaagggaaagaacccagggaggcatgtatttctggactccttactgcaagggaatctgagtgacaagcaagtccttgaagacagcatgatcttttccctggcaggatgtgtgattactgctaacttatgtacatgggctatctatttcttgactacatcagaggaggttcaagacaagctgtacaaagaggtgaaccgggttattgggaagggaccaataacaatggataaattagaacagctaagctactgtcggcagattttgtgcgaaactgtgcgtacagccagcctaacacctatttctgcacgactgcaggagctagaaggaagggttgaccaacacattattccgaaggagactcttgtgctatatgcccttggtgttgtgctacaggataatactgcttggccattagcctacagatttgacccagatagatttgatgatgaaactgcaaaacagagcctttcattacttggtctttcaggaagccaggaatgccctgaattaaggtttgcctacatggttgcaatggtgcttctttgtgttcttgtgagaaagctgaatttgcttcctgttaaaggacaagtcatggagacaaaatatgagctggtcacatcacccaaggaagaggcctggatcactgtgtcaaagagaagctaaaccacttttctactagaacggttgcacctattcctgacaagaaaaacaacatacaattatctctcagaggagaggtcttttaattgtttggctatgtgcagattaccaatttgtcacatttttctaaaagagaaaagttggtgtctaattactaaggcttccattttccatataaaaaatgcagcccacattgttttattaatcaaatgtagtcattacatttcctaaaaaaatctacaaatgctaaaaaagaattctgaagaatggctgaagataaatatgagccttttatgcattctgtacagctgcagaaaacataccagattgatgggtatgaatattctatgaacctgttcatccagtaaccagtagcaacaaatcaacttcttagaggtcacttactgcaaatgcagttgtggtggggcagagtttgctgcagttatcgcatgaaaagttccatttattaatggtgtttgcatccaaagccgctacttattcttggtgctgctgactttgccacacctcctgttacaattttttgtgcaagtgtgtcaattgacgtagggcaacattggagctagtgccacgtctgaaggtggtagtagcagcagcagggtttccactatgggaaaacacataattgtggcaattgcactgtgcgcacttatgattggttaaggaaattattccatttgtgtgctgcctgctgattggtttctggatgtgaaaactattggccttttgctatttaacttaactctcagtccagcacttctaattgtaaaattaaaaggttatcagtttactgtactggaataaaatggtttagtatttctaaaaaaaaaaaaaaa

SEQ ID NO: 32 - DNA, 2181 bp, Xenopus laevis
acaagggaaaagaagcagacagcttggtgcgagagggggagattctgtgccggctgcaccatgggctgcacattgagtgccgaggataaggaggctgccgagcgaagtaaaatgatcgatcggaaccttcgggaagatggggaaaaggcatccaaggaggtgaaactgctgctactcggtgctggtgagtctgggaaaagcaccattgtgaagcaaatgaaaattatccatgaggatggatactccgaggaagaatgccggcagtacaaagtggtcgtatacagtaacactattcagtcaatcatcgctataatccgagccatgggaaggctaaggattgattttggagatgtggctagagctgatgatgctcgacagctctttgtgttggccagtagtgctgaggagggagttatgtctccagaacttgcaggtgtaattcagaggctgtgggaagattctggagttcaggcctgtttcagccgttcccgtgaataccaacttaatgactctgcttcatactatctgaatgacattgaaaggattgcccaaggcagctacattcctactcagcaggatgtacttcgaacgcgggtcaagactacagggattgtggagacccatttcactttcaaggacctgtattttaaaatgtttgatgtgggtggtcagaggtcagaaaggaagaaatggatccattgttttgagggagttactgcaatcattttttgtgtggcactcagtgattacgacttactgctggctgaagatgaggagatgaatcggatgcatgaaagcatgaaattgtttgatagcatctgcaacaacaagtggttcatagacacctcaatcatcctcttccttaacaaaaaggacctgtttgaagaaaagatctccaggagcccccttactatttgctacccagaatactcagggtctaacacctatgaagaagctgcagcctacattcagtgccagtttgaggacttgaaccggaggaaagacacaaaggaaatatacacacatttcacatgtgccacggataccaagaacgttcagtttgtatttgatgcagtcacagatgtcataattaagagcaatctaatggagtgtggcctgtattagtcctgatgatgttgcaggggagactgtattgtctcagtttgatttcaggaccatttgcttgagtaaagaggaatccctgcagtgcaagatgtccctgttttagttttcattgggaatcctgtcttgcacatctaaggtgtctgaccctgagctgtgagccccatcttttctatgacattaccactatcagcacaccaagcatttctcccaccttatgaaatggactgtttctgaacctttgtaaatgcagcatcaatcctttccacctgtattagaatatcagaagaatccgtatgatgacatcttttgttaggacccctctgtttttaaagtaggccgcagtcagactgtttcttcttcttttctctgtggccaggatttgtccttgagctatgcactgctcagagatcacagcacccatatgaatactggactttataactgtttcttgcactcaccatgattacttaacctgctttgtgccattgttttatactaaaacttctccttaaaacggaggagcaactttcattcacaataagccacgactggttggcggctgttacatgaaattcattctcttgtttactattgtgcctcagcagatatctgctcgtactttcctctcctaaatttgtttcagtcctttcctgcttctttctctgtgtattattctctcactgggctgctatttcagccaccactgttaacaataataataataatgcatctctattttctgccccgtttgtgcagtgggcacttccttcctgctctgcatgctttcctgtcttgtgccaaactcccatgtgatggtttttttttttttagtttttaaatgtattttacattccttaatgtgtgcactggcacacatacattaatcaataatattttttcccacttggcattcattaatcattcctcggccatccattcattgtaatcagtgtttcattttacactgtcactcctgtacattgctctgcactccaacactgtcttgtacacagtattaaaatggtgagacatgaaaaacaaaaaaaaaaaaaaaaa

SEQ ID NO: 33 - DNA, 1072 bp, Xenopus laevis
gggcagcggtggcagagaaaggcagatccaaggaggagagttcattccggaatttcagactaatccttccatcagtcagggcctagactggtatcacagaaaccgccaagatgggtgaagatgacaagaaatccaagatctccaatactcgcaaaacccacctgaagagcttgatgctccaggtggccaaagttgcccttgagaaagaagaagctgatattgccgcagagaaggaagcctacctgagtgaacattgtccacctctgagcctgcccagcagtctgtcagatctgcaggaattctgcaagaagttgcacgccaaaatcgatgtggttgatgaggagaggtatgatacagaatccaaagtccagaagagcaccaaggagctggaagacttaaaccagaagatgtttgatctgcgtggcaagttcaagaggcctgcccttaaacgtgtccgtatgtctgctgatgctatgctgcgtgctttgcttggctccaagcacaaggtcaacatggaactccgtgccaacctcaaacaggtcaagaaggaagacactgacaaggagaaggatctccgtgatgttggtgactggcgtaagaacattgaggagaaatccggcatggaaggcaggaagaagatgtttcaatctgaggcttaaactcatcactaacaccactgccatcttaaaccccttagcttacagagacaaccaccataccctaacttctctgttaactagggggaaattcctctgttgctcactcttcagcggggatattgaagtcttacctcctccccactcctggatatttcaccactccactttatacccttgtacaaggtcttaaagaatgttatggactcaaggaggggctcaaatttctgtgtcccctctgtattggttttgcagtagttgtattatgcggacgtgaaaacataaacttgtaaataaagcttgtgacgtcccttaaagttggtgatacctgatctgggaggtgacgtcacgttcctttcttctctagcaaaaaaaaaaaaaaaaaaaaaaaaaaaaaaaaaaaaaaaaaaaaaaaa

SEQ ID NO: 34 - DNA, 1081 bp, Xenopus laevis
gaattcggcacgagcgagtttttttttttttttttttttgctgcgggagaacatacagaacggacagcagttagcgttgaattgtatcctttcattaagacataatgggcaagggagatcctaacaagcctcgggggaagatgtcctcctacgcctatttcgtgcagacctgcagggaggagcacaagaagaagcacccggacacctccgtcaacttctccgacttctccaagaaatgctccgagagatggaagagcatgtctgcaaaggaaaagggaaagttcgaggatttggcaaagggtgataaagcacggtatgaacgtgagatgaagacctatatcccaccaaaaggagagacaaagggaaagagaaagaaggatccaaatgcaccaaagaggccaccatctgcctttttcatcttctgttctgaacaccgtccccagataaagagcgagactcctggtctttccattggtgacaccgctaagaaactaggggagttgtgggcagaacaaactcccaaggataaactgccacatgagcaaaaagctgccaagctaaaggagaaatatgagaaagatgttgctgcataccgggctaagggcaagagtgatgttggcaaaaaagttccagggagggcgacaggttctaaaaagaaggttgaaccacaccaccatgatgatgaagaagacgaggacgaagaggatgaggaggatgaagatgatgacgacgatgatgaataaatgctttgtctgctgtataaattgtgctgaagcccattgtttttgctaagaatgtgaactcgagtgcagctcattttgttagcttggctataaaaactgtacagaattgtgtataggtaatgtgatctgttagggggaaaacctatatttttaatagtgtacgggctgttagtgtaagagcttctgatgtgggattattctgcatatttaattcaaaagtagcaaagtgttagtaacaagacccatttattctttagacctatagacctggtgcattgtactttttctaacttttttttagctgtttttgtaataaaatctatatatatcaaaaaaaa

SEQ ID NO: 35 - DNA, 1340 bp, Xenopus laevis
gcgtctcgtttgctgttggtaaaggagcgattgaacgcacttattaagaacacgcatcgtaagcacttcgtaaggtcagaatgcagatctttgtaaaaaccctgactggcaagaccattacccttgaggtagagccaagtgacactattgagaatgtcaaagcaaagatccaagacaaagaaggcattcctccagaccagcagaggttgatttttgctggcaagcagctggaagatgggcgaaccctttctgactacaatatccagaaagaatccacccttcatcttgtacttcgtctcaggggtggcatgcagatctttgtaaaaaccctgactggcaagaccattacccttgaggtagagccaagtgacactattgagaatgtcaaagcaaagatccaagacaaagaaggcattcctccagaccagcagaggttgatctttgccggcaagcagctggaagatgggcgaaccctttctgactacaatatccagaaagaatccacccttcatcttgtacttcgtctcaggggtggcatgcagatctttgtaaaaaccctgactggcaagaccattacccttgaggtagagccaagtgacactattgagaatgtcaaagcaaagatccaagacaaagaaggcattcctccagaccagcagaggttgatctttgctggcaagcagctggaagatgggcgaaccctttctgactacaatatccagaaagaatccacccttcatcttgtacttcgtctcaggggtggcatgcagatctttgtaaaaaccctgactggcaagaccattacccttgaggtagagccaagtgacactattgagaatgtcaaagcaaagatccaagacaaagaaggcattcctccagaccagcagaggttgatctttgctggcaagcagctggaagatgggcgaaccctttctgactacaatatccagaaagaatccaccctacatcttgtacttcggctcaggggtggcatgcagatctttgtaaaaaccctgactggcaagaccattacccttgaggtagagccaagtgacactattgagaatgtcaaagcaaagatccaagacaaagaaggcattcctccagaccagcagaggttgatctttgctggcaagcagctggaagatgggcgaaccctttctgactacaatatccagaaagaatccaccctgcatcttgtgcttcgtctgaggggtggttaaagtgcaatgagactttgctgcatgtatttttttgttcatttttcttaacagtaattgtgtggtctcaataaagttttcatttctcaaaaaaaaaaaaaaaaaaaaaaaaaaaaaaaa

SEQ ID NO: 36 - DNA, 1872 bp, Xenopus laevis
ctcagtgtaaagtctgtacgtcgcttcggtgcggattccctggctgtgtagttcaagttcccttccatagaggttgtaggagaccgtgcaagggcggaaattgttggtaaaggaaacactgctgtaactgtgcgcctcagcttgtgttgtcattggtgtccgagccttgagacccggcgctcagtttggctaattgtaataggactgaggagctgctttccaagttggcacaggaatgtctgcacttctgaaagaattgaggttttctgtcccctggggacaattagcagctaaagcctggggtcctagtgaaggccgtcctgtgctttgcctgcatggctggttggataatgcgaacacatttgacagactgattccattacttccaaatgatcatcattttgtggctttagatttctcgggacatgggctgtcatcccatttgcctgaaggcgtgagataccaacacattgactatgtgacggacatacacagagtggtaacacaattgggttggcgacaattctcaataatgggacacagtatgggcggagttgtcggtggattatttgcttctgtttttcctgagttggtcaagaaactcatattgctggattcttatggattcttcccagttaatgcggacatgatccagactcacctgaaaaagacaataaactattattctcgcttggagggtgtgagtgctggaaaattatactcgccagaaggtgctctgcagaggctgttggaagcaaatgccagtctaacattggaatctggaaagttgctgctgcaacgtggtactaagcctgtggaagggggtgtggtcttcagccgcgacatcagggtaactgtgaacaattcattacctctctccacagagcagtgccttttgatgctgagcaaaactcaggcggaagtaaacattatcatggctaacgaggggctcacagctgacatgatgcgaggggtttatacggatgtgggacaagccttattgaaaggattcaaagaaagtctaaaggagcgttgccaggttacagttgtggatgggaaccactttgttcatctgaatgagccagaaaaggtggctaatatcatctttgattttctacatgcaaggtcatatctccaatgcaatctctaaagtcgcagagatgcctccgccactcattcatctgcaaatccaaaatagcatctacctgtactaatgtggagagccataaacatgctgtgccacatggagctagaaaaatcacaatatgaaggacaagtagaaaatatactggacaatagtaattatatctgaacacatttttcatcagggaactgtggcatattaggaagtcatctgcaggacctttgaggttcaacaacatgcaacataaaaactctttatgcaattccaacatagatgcgaatcaggatttggtctaagacaaagaaggcaaatggactgcacttgtgccagcacagcaagacaattcaacactgaatatttgttgttggactgttttaaatatactcctgatctgtcagactttgtgttggattcattctaatggaaattgttttgcacagttatggaataagagtaaacaaaaagtcactttgccttagcatggaaacatgctttaaacaaataatgagacaatatttacttttcagaaggtttctgcaactcatggcacaagtcgtatattggcagagaagcccccaaatgtatctgatttcaataaaagcaatagccagcttgacagggtttttgatatttgagccacgtgcaccatgtacctactgtttaggctcatataaagcttcacgtttataaataaataaacatatggaccaggaaaaaaaaaaaaaaaa

SEQ ID NO: 37 - DNA, 5997 bp, Xenopus laevis
gactctaatttttaatatggcttttgctgttttgatgactttaaatacaaagaactggcttactcctcatctgggatgataaaagattttcaccacatgctgactcaagaaaaggattcacgttatggacatccacaacccagaaaagcattggaaatggcaagtagtcatttttccttttctttgtagcttgggctgggtctctgggcagctccattattcagttactgaagaatccacaccagggacttttatagcaaatgtagcacgggatcttgtattgaattctgctgatattcctaaacgtagaattcgactggacacagggggaagtggaaaatactttgcactgaatcacaaaaatggagacttgtctgttaatgaaaagatcgacagagaaaccttgtgtggatctagtacaagatgtattttacctttagaaataataattgaaagcccactggagcttttcagcgtggaaattgaaattgttgacatcaatgataattctccaatgtttttgagaagtgatcagttaattaatattttagaggctctggcaaatccaggcacacgatttcctttggagagggctcaggatccagacataaggacaaatggtgtttccaaatacacactgactccaaacccatatttctctttatcagtaaacactcgaaaagatgggacactggttccagagttaattatagaaaatattttagatagagaagaaaaggaatctcataaacttacaattactgcttttgatggaggcaatcctcctagatcgggtacatctcagataactgtaattgttctagacttcaatgacaacgcaccaatttttgaccattccacgtacaaggctgtcttaaaagaaaatgcaccacaaaatactgttattttgaaactcaatgcaactgatcaggacgaaggacttaatggggaaattgaatacttctttgactacgatacattgaaatctgtgaaagaaatatttaccctaaaccaacagtctggagagatttcagttaatggtgttatagattttgaagaaaaagaattttatgaaatatccgttagggcaaaagacaaaggaatccctgatcatgaaagtcgctgtcttgtcctaatagaaatagaagatgttaatgataatgtaccagaaataacattaacctcattgttgaatgcagtaccagaaaatgcagccttgggaactgccattggtttcctaagtgtgaaagataaagactctggtaaaaatggagaggtatctctggagatttcatcaaacctcccatttaaaataaaacccttcaacaatcgttatacaatagtaacagatggagatcttgatagagagaaaattgcacagtatattcttgacctgattgcaacagacttaggttctcctccactgcgcacaacaatgtctattatcttaaatatatcagacattaatgataatccaccagcattttctcagccacatttaaatgcctttataagagagaacaatgtcgctggaaggtttctatgtacagtatctgcagttgatccggatgatgggttaaattcagtcctgacttactctgttgttgaacggaagactgatgtttcttctatcctttctttagtaaatatcgactctaagagtggtaatatctatgcacaaggttcttttgactatgaacaaatccaggttttacaagttacggtgaaggttgaagattctggatctccaaagctttcttccaacataacagttttcattttcatattggaccaaaatgataatgctcctttgatgttgtatccagagcactcaagacaggtcagtcctcaacagaaaatccccacattatctccagctggatttttggttaccaaaatatctgcagtggatttagactcgggacacaatgcgtggctatcctatcatatagtagatggtacagatccatctctgtttcaaatatcttcttcccatggtgaaatccgaactgtccgtggcttacaagaaactgatcaaattgatcaaaggcttgtcattgtggtgaaggatcatggggaacctgctttatcaactactgttactatatatattacaattgaggacgcagtttttccagagagaccgaagtcccaaagttttgttacttccaataacaaaccagagatgaccttgtatttgattatatcgttggttgctgttagtttagtttccttggttactttcattatattacttgctagatgtgtaagaaaagagtcaagttctacaatttgctcctgctgccttggaatccctcagcccaagtattacactgaacagtgcaggccaactcttcacttaaacacagatggtacattgaaattcatggaggttagaatggagccctcggatcctcaagggcaatgttacaaaacctgtttttctccatcagaaaaaaatgatttttcctatttgagacctattcatttccctgagctgaaaacaatggtcagtgatacagatgtaactggggttactggcactttacaggcgcaacctaacgcagattggcggttctctcaagctgctcagaaacccggacccagtgggactcagcccacagaggaagctggagtttggccaaataaccaatttgaaacagaaagactgcaagcaatgattttggcatctgcaaacgaagctgctgaaggaacatctggccttggaggcggaacaggaacaatggggctcagtgcccgctatggacctcagtttaccctgcagcatgtccctgactacagacagaatgtttatattccaggaagcactctgactccaacaaatggaggaggaaagcgggaaggaaaaggaaacaaaaagaaatccagcaaaaaggataagaagtaatcagtgacatttactaattaagcagtaatcttagaggaattccccaagcgaatttgtgaaagagaatctgaatgtcatcttttgggaaacacagtatacaagttgatcatgtaggtttcatcatctgagctatttgcaaaattattctctgaaactagataattctgcctctagttcttatggtacagtatgtattttcacctctggaacaagtgcccagtcaatattaggcaacattttgtaccagtgcaaggtcatttcatagtagataatctgcacactttttacaaactgctaaaaatatggtttgtttccacatttaaaagtgtggaacttcttccaatgtaaataattgcaatgaaatatctatttataatttagacgcagtcaggtattcaagaaactattcaaacttgtgtccctttttttccaaatctctatgatttttgttttcaagaatccaaataccactggcagtaaatgagaatgtctgaatgtaaagttagctgaggctttggggactgtccaaaaatacattgctgaaggtcatgatcatttggaagccagacatttctccagccagtaattcctctgaccccagaatatgtcaaatatgacaaaagagaaatacaaaaattcaaatagctagaagtttgcctacatgccctttacaggggaacaatatcttgaaactggagcaaagttgagtaatagagccgatactgctgacaaattgtataaaaaaaaaaatctttgtagtgattgtacaactactaatgaaaatgtgttaatggtgttattttaatactgtaattattggtaattgttttcttttttgaataacaaacattcatctcctataccaacagttaatgagttgggagaaattaaaaaactaaataaagaaggtggaaaacacccataaagattatgccgaatgcaaaattagggagtttaggattttcttgactcagagtgctcaagagttttttacacttctgcacagtgaaatgcatgtacaaaacctcacactgctttggcaacttcaccagattgtgttgcatgtttccagcatggggtaattcattctttatataggatggtatataagtgagcctgtttagtgcaggtcggataagtatatgattagaaagggaagagatagattaaatgggggaagacatagatcaacaactgatccaacaactgttccaatctgtacaaatacaacatttacttacatggccaacatttagggctcctgcttttgttttgtgatttactgtgatatttcatagaagacacaattttagccaattattcacaaatatttttaaatttgtccctgatgaacctttattgttggaaggatatcaacctgactgaatctccatcgactaaatgtcagtatttctatagcacccaaaatcctggtatgggcaaattatttatttttgatcactatgttgtattaaaagcttaattgcctaaggaacgctatataatcagttggtttgctgtgagctcccatagagatagatggacagcagtgaggctttttggggccaaaattatcaccaggatactgggtctggaagaggttgatttagaagtcataaagaagtattcttttaactgattcccaacaggctgcatttttctatgtacttgcttaaaaggggctacttggtcagcataagaaaagctgatacgattgcaatgacttgggtaaaaccatttttattaggccgatattttccaaaaatacagagagccaactttgctacagggtttcaacaaagttaatgcatacatttgaaaaagaagccttttcagctcaaccttaccacattactatgttaattcatccagagaaaggcaaacaaaagcattataattggggaggaacaattttctgaccccccaaatggcaattggatttttcagtggatctgatactactgactgtttaatagatcctaatttaatatacccttttccactagaaggcatccaacccatttttgaaccctgccaacaaaccggtcattgaaagaaaagatatccttgaatactcaaaatattgaatgacaccacaagaaggaatgatggcactaacaataaccaatttcttgcagttacagtatgataatgcctctctaatattgatataatgtatgtgtaatggtggacgtacaccggtcgctcatgcaaaatatatgactgatccaatggggagcaaataaaaagctatgtatttagccaaatacatttcttctattggcctgatgagttggatctgcattttctgagttaggagctactcatctgcagaaccaaggtttatcaattccagtttagaccgatcaactgtgatctaaaagaaccacagaatggtctgttaagactcaccaatgagctgacacacatgcctagatgttcacgtagtaggatcggtcaaactgccaggcctagtgtgggcacgtactgccagctttactgtgtactaggtactagtataacaataagcagactattatccaatttcaatgtttcatgtggatagaaaataatactgataaaaaatgtatcgatctactaaataacaagtgggcaaatcctttatttgcagaggaagttcaattctgtaaagccaatgatccaatcgctcaacagccgaacttgtcaagtttcctacatttcatttaaagggacaattttaaaaaaaaacttttcattttacacagtaataaaataagcaactttgcttacctgctaaaatatgttttttgttgctagataagatgtagcccttgatcctgcgcaacccttggaaatgttattaatcttttgtgacaatctatcattttggttccatccagttataggttattaaaagtgcctcttttcagaaggccagcatgggaggggaaagtatgtggaaattagcatttgcttctaaccactgggagtgaagtggtttccatttgtatcgtgagttctccttgtttgggaagctggctgttgttttcaagcttaatgcaggcttttggcgctatatagttctgtttgctaaaaaaaaaaaaaaa

SEQ ID NO: 38 - DNA, 1861 bp, Xenopus laevis
ggctgtctgagtgagaagcagagcgtttccaggtgaacagagggttgagtgttgttcatttttgggagcgggtagagaacaagcggcaattcaaccccctcctcctcactccacctgtagggcccggactccggggttgctgtgcacgtgttgttcgacctgtgttctgcctcggtctgtctctatagaaccacgtgtgtgtctctaggtacttctgtcacttctcccgctggtaatcaggtgttgaaaatggctgaaaatggggacaaagaacagttggatctggataccaagatctgtgagcagattgagtattattttggagaccataaccttcctagagacaagttcttaaagcagcaggtactgctggatgatggctgggttccccttgaaaccatgatcaagttcaacaggttgagcaaactgacaacggatttcaacatcatccttcaggcacttaaaaaatctaagactgaactcttagaaataaatgaggagaaatgcaaaattcgaaggtctcctgcaaagcccctccctgaattaaatgaagattacaagaattcttttaaacacagatctgtttatattaaaggatttccaaccatcacaaatctagatgaaatcaaagaatggctcaacgacaaaggtcctattgaaaatatccagatgagaagaacactccagagagaatttaagggctccgtctttctcgtctttaatacagaagatggtgcaaagaagtttttggaagacaaaaacctcaagtacaaagacaacgatatgattattttatcccgggaagagtattttgcaaagaagaatgaagagagaaagttaaataagtctgaagaaaaagctaaatcaaagcaggaaaaggaagaagcccagaaacaggctgaggatgccgaaaggaaactgatggaagaaagagtgggctgcctcctgaagttctctggtgatctggacaacatgacatctagggaagaccttcatgctctgtttcagacccatggagagattgaatggattgacttcagcaggggagctaaagagggaattgtactgtttaaaatgaatgctaaagaagcactggacaaagcaaaggctgccaataatgacaacctaaagttaaagggcaagaatgtaaagtgggagctcatcgaaggagatgcagagaaagaagctctaaagaaaattatggaagggaaacaggagtctttcaacaaacgaaaaggcagagatggtaggaaattcaaaggaaaaggaagaggtggcaaaggaaatgacagctctccaagaaagaaaatacaattccaaggaaagaagaaaacgtttgatagcagtgatgatgaggatgatatggaagaatctgagagtccccagaaggtgactataaaggcagaggaaacggcagggccaaaaaatggagcttcggctgctccaggaagtccaaagaagagagcgctagatgacaaagcagaggatggtcctgcagtcaaacaatccaaaactgaagttggggatcagtaatgtactatgcctttggtttttagatgcctttttttttttaagttaacttccagatacagaaggtcagtctagagcgaatctaatgaaatccacttcgatatcaacctgtaatgatgatttttgttactttagttttgtgggtgcatgacagtcctgtatattgctatcctgcacttaatttttatacgttttgtttatataaatatgtttccgtgctagtagcaaggatgattgccagtattcactgaactgaaatccttatgtactaatgtaaatgttcaataaaaagtggttctattctggctttgcttaaaaaaaaaaaaaaaaa

SEQ ID NO: 39 - DNA, 6426 bp, Xenopus laevis
gcgttggtttgtgggatctctggaaacgagactcggaacgcgggagaaagttggttttaggagtacgttcggccctggcacgaggcccggctgtcatatttctcattttattatacgagtccagaatctccagtcaatcgctcccgctgaaatggaagacgacactgatttaccccctgagagggaaactaaggatttccagtttcgacagttaaaaaaggtcagactttttgactatccggcggatcttcccaagcagcgctccaacctgcttgtgatatcaaacaagtatggacttctgttcgtgggagggtttatgggattgaaggttttccacacaaaggacattcttgtaaccgtcaaacctaaagaaaatgcaaataaaaccgtcgtgggacctcaaggtatacacgtgcctatgaactctcccattcaccatttggccctgagctctgataacctcacactgtccgtgtgtatgacctctgctgaacagggctcttctgtttccttctatgatgttcggacgctactgaatgagtccaaacaaaacaagatgccatttgcaagttgcaagctgctcagggatcccagcagctctgttactgacctacagtggaatcccacattaccctctatggttgcagtgtgtctgagcgatggcagtatctcggtcctgcaagttacagacacagtcagtgtttttgccaacctcccagccactttgggtgtgacttcagtctgctggagtccaaaagggaagcagctagcggtagggaaacagaatggaacagttgtacaatacctgccgagtcttcaggagaaaaaagtgatcccctgcccttcattttatgattctgataaccctgtaaaagtgttggatgtgctgtggctcagtacttatgtcttcaccgtggtgtatgcggctgctgacggctcgctagaggcctctccccaactagtaatagtcacacttccgaaaaaagaagacaaacgagctgagaggttcctaaatttcacagagacttgctacagcatctgcagcgagcggcagcaccacttcttcctgaactatatcgaggattgggagattctgttggcagcatcggcagcctctgtagatgttggtgtgattgcacggccccctgatcaggtcggctgggagcagtggttgctagaagacagcagtcgggctgagatgccaatgaccgaaaacaatgatgatactcttcctatgggagtagcgcttgattatacctgtcagctggaagtatttatcagtgaatcacaaatactgccgcccgttccggttttactcctcctgtccacagacggggtcctctgcccgttccatgtagtcaacttaaatcaaggcgttaaaccactgaccacatcaccggagcagctttccttggacggagagcgggaaatgaaagttgtcggtggaactgcagtttctactcctcctgccccattgacttcagtgtccgctcctgctccacctgcttctgctgccccccgcagtgctgctccacctccatatccttttgggctgtcaaccgcatcttctggtgctcctaccccagttttgaatcctcctgcatctcttgcacctgcagctacaccaacaaaaacaacttctcaaccagcagcagctgccacatctattttccaaccagccggccctgcagccggcagtttgcaaccaccatcacttccggcatttagtttttcttctgcaaacaatgcagctaatgcatccgctccttcatcttttccatttggagctgcgatggtttcaagcaacactgctaaagtttccgctcctccagcaatgtcattccagcctgccatgggcacccgccccttcagcctggcaacccctgttacagtgcaggctgcaacagcacctggtttcacgccaacgccatccacagtgaaagtgaaccttaaagacaaattcaatgcttctgacaccccaccccctgcaaccatctctagtgctgctgccttatcttttactccaacttccaagcccaatgctacagtgcctgtcaaaagccagcccaccgttattccatcacaggcttctgttcaacctaataggccatttgctgttgaagctccacaggccccatcaagtgtttcaattgcatctgtccagaaaactgtacgagttaacccccctgctacgaagataactcctcagcctcagagaagtgtggcattggagaaccaggctaaagtaacgaaggaatctgattctatcctaaatggcataagagaagagattgcacacttccagaaggaactggatgatctgaaagcccggactagcagagcttgtttccaagtgggcagcgaggaggaaaagagacaactgaggacagagtccgatggccttcactccttcttcctggagattaaggaaacaacagagtctctacgtggagaattcagtgccatgaaaatcaaaaacctagagggattcgccagcatcgaggatgttcagcaacggaataaacttaaacaagaccccaaatatctccagctgctctacaagaaacctctggaccccaagagtgaaacacaaatgcaggagattcgaagactaaaccagtatgtaaagaatgcagttcaggatgtcaacgatgtcttagatctggagtgggatcagtacctggaagaaaaacaaaaaaagaagggcattattattcctgaacgtgagacgttattcaacagcctggcaaaccaccaggagatcatcaaccagcaaagaccaaagttagagcaactagtggaaaacctgcagaagctgcggttatacaaccagatctctcagtggaacgtgccagactccagcaccaagagttttgatgtcgagttggaaaacatgcagaagaccttgtcccagaccgccatagacacacaaacaaaaccacaggcaaaactcccagccaagatatccccagtgaagcagagtcagctaagaaacttcctaagtaagaggaaaactcctccagttcgatctctggctccagccaatctttcccgttctgctttcttggccccgagcttctttgaagatctggatgatgtgagctcgacgtcttctctgtcagacatggccgacaatgacaataggaaccctccccctaaagaaatagaaaggcaggagacccctccacccgagagcacccccgttcgggtacccaagcacgccccagtggcccgtacaacatctgtacagcctggccttggcacggcttcgctaccctttcagtcaggcctgcaccctgctacaagcacacctgtagctccgtcgcagtctatccgagtgattcctcaaggtgcagacagcactatgctggccaccaagaccgtcaaacatggcgcccccaacataacagctgcgcaaaaagctgcggtggctgccatgagaagacaaaccgccagccagattccagctgcctctttgaccgaatccaccttacagactgttccccaggttgtcaacgtgaaagagttaaagaataacgggcctggcccaaccattcccacagtgatagggcccacagttccccaatccgctgcccaggtgattcatcaagttttggccacagttggttccgtctcagcacggcaggccgccccagctgctcctttaaagaatccgcctgcatctgccagcagcattgctcctcaaacatggcagggatccgctcccaacaaacctgcagcacaagcaatcccaaaatctgatccttcagcttcccaggctcctgctccatccgtctcacaggtcaacaaacccgtttccttttctcctgcagccggtggtttcagtttcagcaatgtgacttctgctcccgttacatcagcccttggaagcagctctgcaggttgtgcagctactgcaagggattctaaccaagcgtcctcttatatgtttggaggaaccggcaagtctttaggatcagaaggatcattttcctttgcatcacttaaaccagcctcctcctcctctagttcttccgttgtggaacctacaatgagcaaacccagtgtcgttacagccgcatcaactacagcaactgttactagcactacagcagcaagcagcaaacccggggagggactctttcaagggttttcaggtggagagacattaggaagcttctcaggcctgcgagttggtcaggctgatgaggcatctaaggtggaagtggccaaaacacccaccgctgcacagccagtcaagttacccagtaaccctgtgttgtttagtttcgctggagccccacagcctgcaaaggtcggagaagcaccctccacaactagcagcacctctgcttctttatttggaaatgtacagttagcaagcgctggatccacagcgagtgcatttacccaaagtgggagcaagccagccttcacttttgggataccacagagcacttctactacagcaggagcttcctctgcaattccagcctctttccaaagccttctggtttcagcagctcccgcgacaacaactccttcagctcccatcaacagcggactggatgttaaacagccaataaagcctttgtctgaacctgcagattcatcctcttcccagcaacaaacactgaccactcagtcagcagctgaacaggttcccacagtgacccctgcagcaacaactgccactgctttgcctcctcctgtaccaaccattccttccactgctgaagcaaaaatagaaggagctgctgctcccgcaatccctgcctcagtcatttcaagtcagactgtacctttcacatccacagtgcttgcgtctcaaacccctttagcaagtaccccggctggaggtcctacctcccaggtgccagtgctagtcacaactgcaccccctgttaccactgaaagcgcacagactgtttctctaacaggacaaccagttgctggaagttctgcatttgctcagtcaactgtaactgcagcgtccactccagtatttggccaagcactagcttcaggtgcagctccctctccttttgctcagccaaccagtagttccgtcagtacatcagccaatagcagcaccggatttggcacatctgcatttggtgcgacaggtgggaacggaggctttggacagccctcttttggtcaagctcctttatggaaaggtcctgccacctcacaaagtactttacctttctcgcagcctacttttggaacccagcctgcttttgggcaaccagcagcatcgactgctacatcgagcgctggcagcctttttgggtgcaccagcagcgctagttccttttcttttgggcaggcatccaatactagcggcacatccacttcaggagtactctttggacaaagcagtgccccagtctttgggcagagtgccgcatttccccaagctgcccctgcgtttggaagtgccagtgtctctacaaccaccaccgcatcgtttggttttggccaaccagcaggatttgcttctggcacttctggttccttgttcaatccatcgcagagcggcagcaccagtgtctttggacagcagccagcgtcttccagcgggggcctgtttggagcaggcagcggcggagcaagtacagtagggttattcagcggcctcggagcaaaacccagccaggaagccgccaacaagaatccttttgggtctccaggttcctctggttttggctcagccggagcatctaattccagcaacctgtttggcaacagcggagccaaggcttttgggtttggcggcacatcgtttggggataaaccctctgcgacattcagtgcaggcggcagcgtggcctcccagggattcagcttcaacagccccactaagacaggtggctttggcgctgctccggtgttcggcagccctccaacatttgggggatccccaggtttcggagggtcgccagcattcggtacagcggcagccttttcaaacactctgggctcgacgggaggcaaagtgttcggcgaggggacttctgcggccaccacaggaggatttggatttggatccaacagcagcaccgctgcattcgggagcttagccacccaaaacaccccgaccttcggctctatttcccagcagagccctgggtttggaggtcagagcagtggattctcagggtttggggccggcccaggagcagctgcaggaaacactggagggtttggctttggtgtttcaaatcccacgtcgcctggatttggatgctggaggagctgagagaagtaagaagaagtcgagttgttatacgaccccctgtattgtacctgtcacagtgtagcctgtttatatgtttcccatccagtaggactcgcgctattttatctgactttctcccgaataaaagctcttgttctaaaaaaaaaaaaaaaaaaaaaaaa

SEQ ID NO: 40 - DNA, 1635 bp, Xenopus laevis
tgcaggacagccattatggcatgaaaggactggaagttataggagggttattatcattcaacagagcggaggtgactgcacatttggagtatgcgcgacgacaaaggcaaacgatgcgctattgagaagccataggacaacgcatgcagcaaacatatttgtgcgcagcatgtcctacatttggctttatgagaatgccgagtgagctggaaggccgcagccacgcttgttagtagagcgctacgttgcgtcccttaggcgccaggggctccggcagaagtgggggggtggaaggagcaagagacggagataccgcagtcagacaggagcgaggactagagttatggcgctgcgggtgctggagctgtacagcggggtcggaggaatgcactgcggcctagcagaaagtggtgtagctgctgaagttgtggctgcagtggatgtgaataccaatgccaataaagtctacaaatataactttccccatactcctttatggccaaagactattgagggaataacactgaaagagcttgatgctttgtcttttgatatgatccttatgagtcctccttgccagccattcacaaggataggcctgcagggtgacatttctgatccaagagcaaagagcttcctttatgttcttgacatacttccaaggctgaagaaactccctgcgtatattctgttagagaatgtaaaaggatttgaatcatctgaagccagggaagccttgattggaacattgcaaaagtgcggatatgtctaccaagagttcctgctgtcaccgacgtgtcttgggattcctaattctagactgcgctactttctgattgcaaagctacaaactgaaccgtttgctttcccaatctccaatacaattcttgaagagtttccaagccagcactcaattgaccctggaagaaggagggttattcattgttcagaaaataacccacaagcaggtgcggatcagaaaaatccaagttgcccttttagcggcactgatcatggccctgaaaagacctttctttacaagctggagactgctcaagagctggagagaaaacaaggccaggacaatgacgcctctgttagaatgttgcaagactttctcgagacgagtgtcgaggagatgagccagtattttctgcccccaaagtctttattgcgatatgctttgattctggacattgtaagacccacatgcagaagatcgacttgctttaccaaaggatatgggcattatgttgaaggtacaggctctgttcttcagacagctactgatgttgagattgattctgtttataattcactggaattgctgaatgaagaggagaagcttgcaaagttgtcctcactaaaaatgcggtattttacccctagagagatcgcaaatcttcatggatttccagaaacatttggttttcccgaagaggtaacaacaaaacaacgttatcggctgcttgggaacagtctcaatgtacatattgtctccagtctcatcagccttctgcttcagtctccctgaacgattgatctggccttacatgataataatgtataaacaaacagattaggtgacaattttataatattaataaaagattttatataaaaaaaaaaaaaaaa

SEQ ID NO: 41 - DNA, 1261 bp, Xenopus laevis
gagctcatagtcttgtgagcccagtggcgtcattgcccctccctgggaacagataaaagcagagactgtggtgcaactgccccagatccactgaaaactgctgcacaggtcttacaccatgtctatctatccatctctggaggatctgaaggtggacagagtcatgcaggctcagtccacccaaatggcacaacctgcagcaataatgccgtcggtaccgcagagcaacccaggtctgtaccccaacctgtctgaactctcaaattacatgggtctgtcactgactgatgaggagatccagctgaatatgtccctggtaccaacagggggcagtgagattgcagttccacaggccctgagtgggggcttggtagcaccagtgacaggaaacgacattggactgagacgtgcagagattaaaaatggggtccgggaggtgattttgtgcaaggaccagcatgggaaagtgggactgaggctacgggctgtagacaagggaatatttttgcaactggttcaagccaattctccagcctcattggttggtttgcggtttggagatcaagttctacaaattgatggggatagctgtgccggatggagcacggaccgtgcacacaaagcattgaaaaaagcatcacaggacagaattagtctgatagtgcgggaccgcccattccaacggacaatcaccctgcagaaagacagtactggacatgttggattcatttacaagaaaggcctgattacatcactagtaaaagatggatctgctgccaggaatggtctgctcaccaatcattacctttgtgaggtcaacgggcaaaatgtcattggactcaaggatcatcaggttggagacattttggcatcatgtggacgtaccgtaacagtgacagtgattcccaataaaatctatgagcacatggtgaagagattatcctctgggctcctgaaaaactcaatggaccactctgttcctgaagtttgagctccccaaataaatctgtgtaaaatatgggctgaaagagaacaggtctcccccagatatgccgattctgcactttctaagaataagtctctccctactactacttcattccaagaagaagcttggtatgaaattgcaggccctgattcaaaatgctcagcaaaaggtgcctacgttttcttattaggaattgtgtgtttgtatataatgtactgtatattattgtgacattaaaggaacatttatggaatttaaaaaaaaaaaaaaaaa

SEQ ID NO: 42 - DNA, 2510 bp, Xenopus laevis
gccggtgattgggcggctggctgcgagcgcggaataatgagaatccgttgagagaggaggctgactgagatcatggcagacagcgaagagcaggaagactacaagatacagggatttgatgctgacatccagaatcttctgaaaacagcactaaaagagccagggagtgtggacttagaaaaggctgccaatgtgattgtagatcagtcactaagagattccacgttcagcagggaagctgggaggatgtgctataccattatccaggtggagagcaagcagactgggtgcaccatgttccgctccagcctcctgaaccggcttcaagtggagtataggaaccggaaggagaccagagctcgctctctgcaggagtgggtgtgttacgttggcttcatgtgcaacgtcttcgactatcttagggtgaataacatgccgatgctggctctggttaaccctgtgtatgactgcctgttcgatttggtacagcctgatagtctgaaaaaggaagtggaggttgactgcctggtgttgcagttgcatcgggtaggggagcagctagagaagatgaactgccagcgtatggatgagcttttctcacaactgagagacggcttcctcctgcagggaggcctcagttcactgacccagctactgctgctggagatgatcgagtacagggcagccggctggagtatgactgatgctgcacagaagtattactacagtgaggtgtcggactgatactatagacagtggcgtttatcctacatgcacattaaaagcacaagatcttataaaccctatagttgctgcagagccatgtttcaaagtgaagtgttagagcagaagagcatcccaaaggcatacactttactacaccttttgataaatcctaatttatgtaaaatatacccccaatatttaatggctggctgagccgtattttgtttgtggccttcatccaaccacagttcagacagggtgtgcagttggtcagagaaggacaaatgggtggggttcagcccagagcataaactaagggtttatattggacaagctcaaaagcattcatggctttttggcaataaaattggtttgagctgtgtaatggatttgctgcactagtgtaaaacatataggggtttatattattcgagttcttctgcaaaagctttgaaaacactttgaaggacaagaaaaatccaaataggttattagttgtgtgttagtaaacaaaggttagttgttccagggatgatttgcatgcctgttaggcattatctgcgctggtagagaaaacaccaatactaaacccgtgcattttttgggtggaaagccagggtgttttggcacagtactgctttttcaccagattaggaaattccacgtgttacatgcctccaagggtaatttcacacttggtgtacatgggagaggaactaaatgttttaaatcaatttcatattgaacgtgaattgcctggcaactctgagtcttgagcctgtcataatttttgattattaaaggggaactattgtgaaaatgaaaaatcttttctaaatacaatcaattcaaaattctgtactgtttcttaaatgatctgtttctgttcactatttctctctcagcatctgtttctcttcatgttgtacggtttctgggatggtcaagtttatcttcactgtccctctcgcagcgtctgtttctcttcattgtgtcttcattcagcagttgggtatcaattgacagtgacagacatcatgtctctctacctgcaggatttgtgcaaaagtcagttattttgttagattttaatgtactggaatcagttatttgagtgagctctaatacatctgatagtaaagggagccccctataggatatattagatctaactgtaaatgactgacacccaactcctgcatgaggagagaatgtatgaggagagaatgaagagaggcggatgctgagagagggatagtgaggatgaacttgattatttcagaaatggtgcacaatttaattgattgaggaagtttcttatttcaatatgaagaagcgtatattaaatttaccttttcttatagttcccctttaagcatgtacatcagcaggatatactcacagaaaggtaaatggggagaaggaagtgatttagaagacttgtcccctttcacagaggctacaaaatgcttgacattgcttataactgttctagagtcagtgaaaaactaaattgtcagaactttaggatagtgcatcccgccatgtcacagcagatgtaaggtatatgcatccatgggcttcctctgccaccggctctcaggttttctatttgcagccatttcacatgagaagacttgaagcaagcaacactcacactaagacgggtgctgtaaatggagagagcagttgtcacctactaaagcacaccaccaccacctcttgtatccatagggcaatacataatatatactctgctggctaatttgaaaaaaaaaaaaaaa

SEQ ID NO: 43 - DNA, 738 bp, Xenopus laevis
gattcagcgtgagacgtgtctctactgctcattctttctcatactgaccatggctccgaaagctggcaacaagcagcagtccgaggaagatctgcttatgcaagacttcagccgcaacctgtcggctaaatcttcagcacttttctatggcaatgctttcatcgtgtctgcaatccccatttggctgtattggagaatatggcacatggatcttgtccagtcggctgtgttgtacattgtaatgacattgctcagcacctaccttgtggcttttgcatacaagaatgttaaatttgtcctcaaacacaaggtggcacagaaacgtgaagatgctgtttctagagaagtgacccgaaaactttcggaagcagacaacaggaagatgtcgcgaaaagagaaagatgagaggatcctttggaagaagaatgaagttgctgattatgaggcaacaacattctccattttctacaataataccttattcctggttttggtgatcattgcttctttctttattctgaagagcttcaaccctaccgtaaattacattttatctttaagtgcttcctctggactcattgctctgctttctacaggatcaaagtaatcggacaccgatttcaaaagcatgaataaaaaaaaaaagattgttttctgtattttttttttccttaagcaaacagtgtgtaaaataaacatcttttgtggctaaaaaaaaaaaaaaaaaaaaaaaaaaaa

SEQ ID NO: 44 - DNA, 1285 bp, Xenopus laevis
ggagaaagagaagaatcagggctagccacacaagcaggtcctcttccaagaagtctatttcctgaaccatgggttggcatgatggctgcatacgctgcatggttggggtaccatttgcttcagtcattgccacagtcctgtgttttgccggagtggccctattctgtggctgcggacatgaggctttgagtggaacagagaagttgatagagacatatttttccaaaaactaccaggagtatgaatacctcattcatgtaattaatgcctttcagtatgtgatctatggaattgccattttcttctttctgtatgggatcctacttttggctgagggattctatacaacaactgccatcaaacacatcctaggagagttcaaacccccagctatgaagggtgggctcatctctacagtgactggaggaccacctaaaggaagaagcaccaggggaaggcagccagtccatactatagagctcatctgccgctgcttgggaaagtggcttggacaccccgataagtttgtcggtgtcacttacgttatcactattttgtggatcctgatctttgcctgctctgctgtccctgtctacatttacttcaatacttgggtcacctgtcagtccattgcattcccagggaaaaccacaaccagtgtcagtaccctgtgtttagatgctcgtatgtatggtgttctgccatggaatgctttcccagggaaagtatgcgggaccagtctgcttgccatctgcaagaccagtgagttccagatgacatttcacctttttattgcggcatttgtgggtgcagctgcaacacttgtggccctgatacacgccctcatgtgtctgtcggccaacagggtgtatcaacagcgtgtcctagaggaaaaggggaaaagccaggagacaccacaggctgagagctcagaactcactgatattctgccagagaccccccaaaggagtgcagagaacctgttgtaaaatgtctgttatgtttggagtgtcccaggttaggagaaagccttttattgccagttttgtttattatatagggcagttctattgatcatataccagtttttttcatgatgtacatcaatgattattagttttctataattgtattattctttaatactttaagtcatcagtaagtctgttaactgaatcaatatttgtgttctatttaccctacactgaaaccttaactttaaaacatagttatgccaataaattggaataaaccgaaaaaaaaaaaaaaaaaaaaaaaaaaaaaa

SEQ ID NO: 45 - DNA, 1462 bp, Xenopus laevis
gagtttacagaactttctcggctgatggcaccgatgtttaatatacccgttgccagccacacgactcaaaggatcaagacatttctcctcttttcaatgagtctgctcagatccaggaagattttagattccttttaactgattttattccacagcttctctttttttttggttacatttttttatctattgaagcacacagcaagagactgcactgcctgaagattgttctgcctgtacggaaattacagttatcataatctggttgacattttccagtcacagctaaatacaaataatggctgacagtcagttgcccttcacctgccattacccatctaacagacacaggggaagtcgtgatccttttcgggaacaaggactgtcatctcgtcttcttgatgatgattttggcattccacctttttcagatgatttaaccatgaactggccagactgggtaaggcccagactgacttcctcctggtcaggccctttgagatcgggcttgatgcgaacgtcgggcatctcccctcccgtatataattttagttacacgggtaatccggaacctcgtaacactgtagcaaatgtcagccaaccgtggaaggtctgcgtaaatgtgcaaactttcatgccagaggaactgacagttaaaacgaaggatggctttgtagaagtttcaggtaaccatgaagagcaacagaaggaaggaggaattgtctctaaaaacttcaccaaaaaaattcagttgcctccagaagtggatgcactgactgtttttgcctcgctgtctcctgaaggccttcttatcattgaagcacctttggtgcctccctataaccagcagggagatgatagttacacatatgagctgcctctagatcctcaagaagtctgtgcttcctaaaatccttcaataaaaaacctcagttgaggaacaaaatgtggattccaaagaattttgaaatagtcaagcagtttcatacttttgaatattgtgtattttaatcctaatatgaaagtaattttactgtagtttactgtagagtaaaaatgaatcaaacatgtctttcatttgcctcactgtgattttggatgtcagatataaaattcctaatcatttttgtttactgattatgaattactctcatttacagaactgtttcagcaaaactgcttaccaaagagttaggttttctttgattaatgtaataaaatcgaaaaatattccatttgtctgcatggacaactgtggtctggcttatatgcatattatcattgttagttctatcttacaaaaaggaactgtgctggtaactaaaagcctactggcttatttagtatctctaatttatagcatgccaacattctactgtgatatgcagaagcttagacatacagatattcatgacaggcagttaaaataaaggcaacatttaaacaaaaaaaaaaaaaaaaa

SEQ ID NO: 46 - DNA, 790 bp, Xenopus laevis
gggacttgtcttcagtttccacttgaagtcaatctaaagccaactagctccctcttgtcaagatgactctgaccgacagtgataaggctgcagttgttgctctgtggggcaaaatcgcaccccaagctaatgccattggagctgaggctttggagagacttttcctgtcctatccccagaccaagacttacttcagccactttgatctgtctcatggctctgctgatcttgccaaccacggaggaaaggttgtgaatgctcttggagaagctgccaagcacatcaatgacctggatgctgctctgtccacactcagtgacctgcatgcctacaacctgagagtggatcctggaaacttcaagttgctgtctcacaccatccaggtgactctggccatccacttccataaggaatttgatgctgccacccatgctgcttgggacaaattcctggctgaggttgccaccgtcctcacctccaagtacagataaagaaagaagacatcagcaagggcagctcaccagcctggggaagatctatggaaaccatgcacaaaattgccactttaacagtggtcatgttttgaccaaaatggaactgtaacaaacatcagctgaggttagacgtgttaacatttgacatggtttatagccaaaagctggttaatattgttgcacaaaatgaatttgtgttgacttgtccatcaaaaattatgactggtgagatactcttaattaaataaataaaaaaaaaaaacaacaaaaaaaaaaaaaaaaaaaaaaaaaaaaaa

SEQ ID NO: 47 - DNA, 2121 bp, Xenopus laevis
aggggatagggagtacagcgctgctcataccctccacctaattttcttcaaatcttgaagttcagtccagaggcgaaacggcgactacagccgaattcctccctttcatttgcctccccatggatatgcactgcaaggcagaccccttctcggctatgcacccagggcatgggggtgtgaaccagctcgggggggtatttgtcaatggcagacccctacctgatgtggtgagacagaggatagtggaactggcccaccaaggagtgagaccctgtgacatctccaggcagctgagggtcagccatggatgtgtaagcaagatcctgggcaggtactatgagacgggaagcattaaaccaggagttattggcggatccaaacccaaggttgccactcccaaggttgtcgacaaaatcgcagagtataagagacaaaaccctacaatgtttgcttgggaaatccgggacaggcttttggctgaaggaatctgcgacaatgacacggtgcccagtgtgtcctctataaacagaattatcagaacgaaagtccaacagccattccatccaaccccagatggatctggaacgccagtcggcacacccgggcatactcttgttcccagtacagcatctcctcctgtctccagcgcatccaatgatcccgtaggctcttattccattaatggaatcctgggtattcctcgttctaatggcgaaaagaggaaacgcgatgaagatggatctgatggttctggtccaaatggagattcccaaagcagtgttgaaagtttacggaaacatctacgggctgataacttcacccagcagcaactggaggcattagatcgagtctttgagcgtccttcttatccagatgtctttcagactgctgagcacatcaaatctgaacaggccagcgaatactcccttccagcgcttactcctggtcttgatgaagtcaagtctagcctatcagcatccggcaatgcagacctaggaagcaatgtgtcaggaccccagtcctaccctgtagtaaccgggcgagatatgtcaagcacaactcttccaggttatccacctcatgtacctccaacaggacaaggcagctaccctacatcaactcttgctggaatggtacctggcaccaacgtttcggtccaccattcggtccaacctgtggagtgctgctcatgtctttccagctctaaaccatgtctgtttcactgcaggactgggagtgggagtgaattttcaggaaatccttacagccacccacaatatacaacctacaatgaagcctggaggttcagcaacccagcactattaagttccccttattattatagtgccacatccaggggctccgcacctcccactgctgccactgcctatgaccgccactagttaccatggaaaccacatgaaactacagggcgacaacataggcctccatattgtacctgtctgaactacatcaactatgccatcggaagaagagtggcctactctgctttccctactgacgtttctcagctgtaataagctgctcttacctctgctgcaagcctctttgttgttattgtgcacggtagctagatgaacatcaagccaagtcatctgatttcagaacttatttccaaaaaggcccactatttaagttatgcagtggattgtagtaggaaaccacagaactcatgtcttctccctcaaaaaaaggaatgcggaatatgaataccttttctaagaacaaacatgcgtgctacaataaagagagaaaaactttttatgggcagcaaattcaaactggaatggggaaaaacagctatatatatatatagcgtgttcctcaaatggtgcaagtaaaagagtttttacagaataattatggaacatttagcagttggaggatgggaagctaaaaaaatagatgtcttcaatgatgactctcgggaaaactgcccactttacttggacgggatgcctctctcatattctctctccccattgagctggcatgtcatgatattccacaacgacgcagttccagtcaaagcaacaatcaactcagagaagaagacagaaggacatattaaagtcaatcgaataaaccaaaaaaaaaaaa

SEQ ID NO: 48 - DNA, 2110 bp, Xenopus laevis
gtcgaactgcgatcttttgggcgttcccagaatttgtggcagctgtcgctttcgtttttgagatccgtcaatttcgggactttctatccccccccccctaatttctgtcttgttaggcgccgtttcccattatgctgagtcctgggatcctgtgacgtgccggccgagctctgcttgaactactgcggcctctgggagctgtaatcagcaaatagctgtttgcgactgtgcaagatggcgcccctttcctgtaaccccccagagtgggaagatgatgagcggatgtctttcctgttctcagctttcaaacgaacacgtgatgtaaacacctgtgattgggacggcaagatgaaattttggatccctctgatccttacacatgccagggcccaaggacttctcagtattacacttagccaactggaaaacgacttcaggcgcaaaggctgtgcaccgatgggactgagaactgttatccaggagatgatcaggcaaggcacgttgagaaaggagacagattttgtgtcaggtgtcagcagtgggtggctgtcttggggcatgaggcaactggtcattagacctcttcgctggacgataggtacaatgctgggaagccaggtgggccctgatgagccactagtgattcctgaagttataaaggagcgtgcggctttggtgttgcagcgataccagtcatccacttttcgccctttcccattgctgtgcgaggaggaagtgcacaccctttgtgcagagatttgccctaacccctctgctttgaatctggtgctgcttcagctgcagggagataagaagatttgtgttttggagagagctggacagaagttagtaaaatttgtccgagtaagtgtggggcaagtggaaccaattagcgaatccgacctggggatatatcaattacagcagggcgaaaaactcctgtcagagcgacttcagagtgcaggggaggagtctaataggctgacggaggaagccagaacctataatcgggcaggaaacaagaaccaggctctgcgttgtttgcggaagagaaagctagtggagcgtcgcattacggagctgcagaacaagcaggacaacatacagggaatcttggagaggatatcggctgccgaaacagaccgcaaggttgtctctgcgtaccagatgggagtctctgctcttaaacaggccctaaaagatgtcactttggagaaggcagaaagtattgtggatcagattcaagagtattgtgatctccaggatgacctcagtcagacactgtcctcagtcaccgacgcagatgttgactctgatgatttggagagagaactcaatgaaattctccaaaatgaagagatgattattgaccttcctgatgttccttcaggcccagtgatcatttctcccaagcgccctacagaatggaagatggaccaggctgctcattctccagcagatggatcgttcttgaggtctgttccagagccaatgctacagtgacaataccaaaaggttgacttttatggctgcttgtcccctactcacaggacctatgctgaggaaccactatgactctaatgaaccaacagagtaatttcttatgacctttatgatcatttatgacaccccagacccctctataagacttgagaggacagatacttgcataaaatcaggggtactgccaaacagagcctcatttaggctgccagcccacatagggggtaccaatagcaaatcacagcacttatttggcacccccagggatgtttttattgcacgtgttgctccccaactcttttcacttttgaatatggcttctgggtaaaaaaaagttggggatccccactctagaaccactaaaatgctgctgagtttgggctattcaggcttgtcctaagtgttatacattcttattatgtaaactgtattatccaatcataacaaaatcagctgtttcatacattatttcagacaaatgaatacataaaaaatactttatgccaaatgtaatgtaagtaaaattaacattaacagttcagaggatagagtcctttttattgtgtatttataataaacatataaatagaaaaaaaaaaaaaaaaaa

SEQ ID NO: 49 - DNA, 2198 bp, Xenopus laevis
attgttctgggacgaggaaatagtgtgagacgtctgtcagtattgccacaaagacctgttctacccccacgaggattcctctccctcttcaactgggactagactcacggcagatctgacttgtgccggtgcaaagtgtgaaacagtctgagtcgtataatacgaggaagagccatgcggtgctcagcttttatacggattgtagtggttctgcttaccctgctcacaacgtggtattttgctgaaaaattttattccaacaaagtagatatgaagagtctgaggagtatgtttgataataaagctgaagaggcgccaagaaagaagaaagtcaagttcagctgcgggaatgaaaaaccctgcccagacggttactttgcgttccaaattattagcggtgcagccaatgtggtgggaccatctatttgctttgacaacactattataatgagcagtgttaaaaataacattggccgaggactgaacattgcactaataaacgcttccactggggctctgatcaaaacgaatgcatttgatatgtattcaggagatgtgaaacctctgctggaatttataaagcctgtgaaggatgggacactggtgtttgttgcatcttatgatgatccaggtacaaagttaaatgatgaagccaggtctatattcactgattttgggagcagttatgcaaagaaagtacgtttccgagacggctggatcttcgtgggaggaaaagggataaatgccaaaagcccatttgaacagcacatcaagaacaacaaggagacaaacaaatatgatggatggccggaggtgctggaaatggaaggctgtattcccaagaaatcaaactaaagacacagtctcctgccccacttgctcccatagcagatccagtcatcacaatatccaaggccgctgaacaaactgttatcaaacactggtacttggcttgtaacaatgaaacaagcctaaagcacagacaagacctgtctcttctcccaaccagggactgcatagactttatttagtgttgcctttagtatgtactgggaacaccggagctggaatgtaattatggatgaatgaagtcaacagacgagagagaccaaagagactaaagagaaaaaggatgactatgaatgatatattcctgtctttattataattggcacagcgtggcacaggagctcgcaatctcttgctaaaggggtttagaatctggggttccggcaccagaagatactgtgaattgaacttgcccctgtaaatgttctgctaattatttgcattgatcgctggttatttcccttgccattcagagacatcactgtttgcccagtgaacatatatatatatatatatattgtatttaatatgtgggaatcaggggggcaccagtcacgaggcatttccccgcaaggggcatcaaaaagctgctcctggtaactttaagagccaaatttctgagttttaaaccggacatttggctcttgtagtggatgagagcgcagttactcgggggatggcatctcaggacctgccttagggcggcttaatcctccctggtgggaattgtggttgttattggtaataataacataattaggggattaggacacaaaattggcgtgttcaaaaaatctttttgtctctctttctgtttccaaaatgttgggatgtatagttcttcagagtagagaaaatgacctgtgtgccgccttaggtaccataccagtatagattgtaggactaaagcattccatgcagtggtgtaactagatattactgggccccacagcaaattattttttatgcccccataatatatttctagaggctttttactaatatttattgaacttgtatatgaattgcagtgtcaaggggcccctatacctcctggggccccctgcagccgcagggtctgcttcctctgtagttacacccctgattccatgagttcatttatttcttcttatttatcttctggtgtctatagtgttggactgtgccactggaataaaataaaataaaccccgtgttagagtgccctttagctcttaaacatttggcctatatcatagtcattgactatttctgtattaaaacaaagaggcaagatggaagggtacaatgtgagatgcaaaataaaaaaaactaaaagaataaattaaaagaataaaaaaaaaaaaaaa

SEQ ID NO: 50 - DNA, 1735 bp, Xenopus laevis
cccacgcgtccggtttggaggaggggggtctctgtgtgtctctcttgtgtgtctctctgtgtccagcaaacactgagactggtgcaaagctcaaggtgtgcgctcacatctccctctaactttgatacctgcgcttggtgctctctcgcgtccgcgtgggtcagactcgcaggcagaattaatgatgggctcggtgctgccggctgaagcgttggtgctgaaggctgggctcaaacagccagggctctccttggcagagctcattacctcggacatcctacacagcttcctctatgggcgctggagaaacgtcttaggggaacaactgtttgaggagaagaacaatcacatcagccccaaaactgctttcaccgcagaggtcctggcacagtccttctcaggggaagtccagaagctctccagcttggtgctgccctctgaagtcatcattgcccagagttccattcctggtgagggactgggcatcttctccaagacctggatcaaagctggcacagagatgggtcctttcactggcagagtcatttccccagagcatgtggatctgtgcaaaaacaacaacctgatgtgggaggtgtttaatgaagatggcaccgtgcgctattttattgatgccagccaagaggaccatcgcagttggatgacgtacatcaagtgtgcaaggaatgagcaagagcagaacctggaggttgtgcagattggcaacagcatcttctacaaagccaccgagactatcccaccggatcaggagttgttggtttggtatggaaattccctgagtagcttccttggaatcccaggggtaccaggaatggaagaggaacagaaaaagaacaagcaagaggaatttggaatcgtggactccacagggccgtcgctagcaggccgcatgcgttgtgtcatttgccaccgtggtttcaattctcgcagcaacctgcgctcccacatgcgcatccacaccctagacaagccctttgtctgccgcttctgcaaccgccgcttcagccagtcctctaccctacgtaaccacgtccgcctgcacactggggagcgcccgtataaatgccaagtgtgccaaagcgcctactcacagctggccggcctacgagcccatcagaaaagcgccaggcaccgtccacccaatggttccttgcagacccattccccaaccttgccagtgccacaccctgccaccctggcacaccacattccaaccatggtgctgtgaaggccatgcccactgcattgaactcgaaccctagcttcaatatgaactacgctctttggtattggacagagctgccatatctgtttatgtttattctgcaggtggcagttggagttaccgtgccatcaagccttggcctgtttcacacaggggtcctccagcagtaccaggctctgcagattctgttagctgacgctaaccttgtataaaggcttaatataaataaatatataaatatatatataaatatcttattaaaaaaaacaaacaaaaacaaagaaatgaacgtatattacctctaaagtatatgtatcgggttttaacccctgaatgggaaaatgaaacaaacgagtcactttatttctgtaaatatgtacaacctgctgtcccccgtgacatgtagaatatttgtaagatatttgtacctttctgtaatgatcacttattcccaaaataaaggaacaaacaaataaaaaaaaaaaaaaa

SEQ ID NO: 51 - DNA, 2199 bp, Xenopus laevis
gctcagagaacctccagagccgtctgccttggccaaggaatatcagccttaaacatgcacttccgcaacctgaactacagcttcgcgtctctggtggcctgtgtggctgagactgagctcttctatcagagtgaagccaggaccaaattcgaatcgctctttaaggcctacgacaaagaagtcaccttccagtattttaagagcttcaagcgggtgaggatcaactttagcaatcccatctctgcggctgaggccaggatccagttgcacaagaccgagttcctggggaaggagataaagctttattttgctcagacgctgcacataggaagcccccatctggctcccccaaatccagagaagcagtttctgatctccccgccctcctcgcctcctgtgggttggaagcagatggaggacacgactcctgtgatcaactatgacctgctctacgccatttctaaactgggcccaggagagcaatatgaattgcacgctgcaactgacacgactccaagcgttgtggtgcaagtctgcgagagcgatccggaaaatgaactggaaatcgaggaagatgaagatgggatgagcaagcccaagccaaaaatcatccagacaagaagaccagactatatgcctatccatctaagttgaagtggagggcgtcagcattttgtggtgaaacccaaggaactcattgaaatattttactgcaggaaagggcagagcacggtgtaggacggctgtggtagtggtctgaatttgtccgtcggcaaaccaaacctggacgttttgtgtttgctttttctttcgtgtatctgccgaatgtgtaaaatttggaatgtcctgctgctgggctgatggaaagtggaaaaaaactgaagcttcacaagtatttagttttattagtcttttctggagggtctaggaaaagtggaactttaaggttgctgaaagtgcggagccaggaatgtcatcgatagaacgtcaccgccgtatatatagttggagcgtgactgtgcgcaagcacaatgttacggacaccagatctccaccttatatgatggaacaatttcattgctatgtttcagaacatcaagtggatggggcaatttttttttcttgcatgtagactatatcatttttttttctaaatattctagtttgtgttaaaagctgcttacattgccctgcaaaatgcaaaccctgtaacagcccattgtgtgatcccaaaaggtagaaagcatggcccgtttttcagaaacactgtggcactacagggaaggcacctgttatattttctggctaatgaactgtcatgtacgcttaatgcaagggaaaatgtgatttaagtttgttttttttctctacggggcaatgtgactgtcatataaaagtaaagctaggcaacctttgttataagttacatcttaaaatagggcacaacgttgttctgtgattgggggttataaatgttggggatcgtggaggcagggtgaggtttactgctttacctgttgcaagaactgaatgaatttaaagtgttgttcatatcagccatgttctaggctatagctggggagtaagctatcaatggcattacaggcaaagcaacatggaggtttaaaaatggatcttgtaatccgttgggtaaatgtggttaagccccatagccaaaaaaaatcaaaaatgtggactttaagatttgacaggaacgtgacttgcagatggtcattttttgggtaatccagtgcctttcactttggttataaatggagggatcacagtgtcagaaccgctgtactgtttccagttagaatttccttatctgtgtcttctaatgacaagatggaacagcaatggccgtgcagattttggtctgccagcccagataatgagggttaggccagtaaatcataaatcttcccgtcggccactgcccttagggtggcgacacctgctgtgtcttgttaaaaaaacagataaatacctttgtactagaacccttggcacaccccgtgtagagagagaggtttcccagtgtgtcgtgtatcatgtctcattaccactcactcactcacactgtttttgaagtctgcttttaaactggaagtttgaatctctgtcttctgttttctattcacttgtattacgataataaacttcctttgtattagactgttaaaaaaaaaaaaaaaa

SEQ ID NO: 52 - DNA, 1826 bp, Xenopus laevis
caggaaggagcggctattcgagggaataagctactgtaaaggacagaccagagaagctccacacagaccctttgctctctctaatgtgcagtaacgatgagccctgccttcggagccatggaagtggagcactacgcaaagggagttctgctcgagccttttttacaccaggtcgggggacattcgtgcgtccttcgctttaatgacaaaacaatctgtaagccattgattcaaagggagcatctgttctatgaaacactccctgcagagatcaggaagtttacaccacagtataaaggtacgttttcccttctttctatggaagccacgtttatttcaactgtttctggtatcctctgttctccctaaaacgcttctctgcagaagcctttggggaattttttttttctttttcacatatttcaatgttgtcagggacaggctgtgatgcgtgagttggcgatgcttaccattgggtctcttggctgactaaaagcattacagtttagacaagctgtgcttggggccttaagtctcccatagtctcccagtaggtaagtggaacttgttcagaccagctcttagaaataaatgatcatctgaatctttctttcctctgtgctatcattttcttctgccttcactctttgaaagctgattacaattctcccatttatattttaatgttcctgcttagaatgaaatggcctaagcctaatactgaagaggaaaaggatgacagggataaataacccattctgtttgcatcctgtagtaagtaattagactcggatgccgttagttgcaactcttgaaattatctgcttttgtgatactttctggataacgttgaatattcttttcagtatattcattctttttctcattttcctctttccatatttctcatatatatggactgtatgaggtccttcatttaacgaaagaaacgcaaatgtgttaatggtatataacaacacatttaaatgttctttgaaaggttgggaaccagcatttatgactgttgtcttatcgtctttgcttctttccactattttgtttttaatatggtgaagggtggtctatttacacagaattaactgtgatatattgacaggctgtttgctagatggctttaaccctctatccttgtagccattcctttttgtgcttggaagcagtggtctgagcttctgcaataccttcccagctactgtaagtccagggtcctgcacctctctcccagcagtcctgagggacatgagcagcaagaacgcatgcagactctagaaagcagagagacttaaaggacatttttggggcactcatggataaaacttgaatgattcagatgtttcaaagacttttagaaaaagtcagttctttagagactgatgagcagaaggtgcttccatggtttcaacaaaatgcagtttactttgtatcttgtgggttttttatttatttattttttcaaactgccctgctgcaactcagaaaacaagtcatttgctttaaataaaacctaagtaatcatgttgactctgaaaataaagctttacagatagtttgtttcgtttcacgttctgttttgctttgcttgtagctctactaatcaggtgcctagatctgtcttcagttttgtgatatactgaatgctttttttcatactttttgattttttttttgctttgcaacattgcattatggaaacactcttgtgtttcactgtaagatgtaaataagaaatgttttacatctttaaatacaatcaataaaaacgtcatcttaataaattttatccagcattgaaaaaaaaaaaaaaa

SEQ ID NO: 53 - DNA, 1612 bp, Xenopus laevis
gtggtgaggggagagcagcagccccaggacacgcaatcatagggggtctttcaaaggctcttatatgagctcactactctctttgcagaagtccttctggatatccccttgcttggaatttatcacacatttcagttaatctagcttctgctatctcatcagaggacactattatataaagagagaggattttacaaggtcaccatgttcattatggggtcactctttcactcccatgtcttgggggtcttctctttccttgtctgtgctctgccgaccacccagtctatgatatatgcgtactcagatgcgagtgtcagggaaccgcagatgtttgacgaccttcctgctctgtttggaccttctctgtctattgatggcatgaagggcagtttggttgaagctgtacccagcaatggctgctcacccatcctaccccctcctacactggccaacgacaccagctttattgtccttatacgcagatacgactgtcattttgataccaaggtgttgcacgcccagctggccgggtatgctgctgccatagtgcacaatgttggctctgactcactgctgcacatgagcaggaatgatgagaccacctggagacacatcactatcccctccgtgttcactggcgagactgccggcaactcacttctggccaatttctccttctacaacaactcccatatttacctgatgccggattattccttctccctgggatactatatcattcctttcattgtggtcgtctctctggtcattgtagtcatgtgtatcataatggtggtgcgatgtgtccagtaccggaaacggatccgcagaaaccgcttgtccaaggaacagctgaaaaaaattccaatccacaagttcaaaaaaggggaccattatgatgtgtgtgctatctgtctggaggagtacgaggagggcgacaaactacgggtgctcccctgctctcatgcctatcacagcagctgtgtggatccctggctgaccaagaccaagaagagctgcccggtatgtaagaacagagttttctcctcagactcggactctgatactgatgggaatgtgactaatggtgaacagggtgatgatgagcgcacccccctactccgccccgcaccctcttttggcagcatggaggagtccccccgtgccctggaggaggaggagtcagtggctgctactggtgtcattgtgtgatgtggcctttcccagaatcctctgtggccacagttggatcccttgtatgatctgcaccccccactgggacaatgatttgtattctgtgactccgggggctcccataatccttatctcacccttcccacaatgcctcatgtgactggttaatcccctcccccctgcttcctcattggctaatactgggctgatcctggttattaatgagacggggggggaaagagctcatgtttgtttcacagatcggctgcagctctaggactggcactgaattgtacatcagaggaatgtggcagccacaaaactggcagttgcagcagcagtgggtctgtaccctatgagcccctgtacagcttttatataaagactttccttactaataaaaaaaaaaaaaaaa

SEQ ID NO: 54 - DNA, 1482 bp, Xenopus laevis
gaaggaaagagttgaatcatggcagtagctgaattgtagagttggtgctgtggtgcaggtacgtgtgtgtgttgtactgaggactctactcgtgtaaatacagcgctgtcacttcatgagcgtcacttctgtcagggtcctggtgtctatctaaaggcagaatcacctctcactatttggataactttgcttgctgagtaaaggctatagcccactaatcagtgtctgcatcttctacaaggtaaagaaaaggaccactatggaaatggagatcactaaattcaacattgatgctcctcgatgggaccaaagtacatttgtggggaggttgaagcacttctttaacattacagatcccaggacagctcttgtctcagaacaggaattggatagcgcaaaacagcttgtggattcgtgcagagcaggttctgtgccaccaggaacaagtacagaacaactgcattatgccaagaagctttatgactctgcttttcatccagacaccggggacaaaatgaatttaattggaagaatgtctttccaagtccctggcggaatggccatcacagggtgcatgcttcagttttacagaactgtgccggcggtggtattttggcagtgggttaaccagtcattcaatgctttggtgaactatacaaacagaaatgcagcgtctccaatcacgctcactcagattggcgtggcttatgtgactgccacaagtacagcattggctacagctgtaggactgaacttgtacactaagaaagctcctcctttggtagcacgatgggttcccttcgctgcagtggcggctgccaattgtgtcaacattcctatgatgagacagcaggagattcttaacggcatcgcagtaactgacgaaaacgataataaactgggacactctaagaaagctgctatcaagggaatcagccaagttgtaatctccagaatagccatggccgctcctgggatgattctcttaccaattttgatgcaaaggctggagtcttttgcctttatgaaaaaaatacggtttcttcatgctcctctgcaagtcatgctggccggtggtttcttgctctttatggttcctgttgcctgctccttgttcccacagagatgctccatgtctgtaagcagccttgagccagaactccgagagtccatagtgaaccaatatggagacaacattcgctatgtttactttaacaagggactgtaaccatcttataaatagacaggcaaaaacaaaaattgattagaaaaagagacattgtccattgaggaaagtgaaacattttaatctgtgtataaaaaaaaatgccttttaaacaatattttcaggaacagtattttcatggggaagaaactcccacacagccttgttacctttcagccaatgaactggaaccgttacaaatacattttaatgcaaggaaaaaaaaaaaaccaaaaaaaaaaaaaaaaaaaaaaaaa

SEQ ID NO: 55 - DNA, 1912 bp, Xenopus laevis
gagtcacagaacaacgcgcttctgtagagcacttccgcccgttctccttctatttctaagtgcgacatcaccgcctgtcaggtgcattggtccccgatcctcaacatgacggtcaccgtgaaagcctatctgctgggcaaggatgagagtcacaaggagatccgccgcttccagctcgagctgccagtcgctggcaaagggaaggcggcctcttccgggtccagctgcgagatcctcgctaacaaggtgacagatgtcttccagggcctgaaagggggagccttccagatgttctacaaagatgaagaaggggacctggttgcattttctaccgatgaggaacttcatatgggcctttctctgctgaatgaagatgtgtttcgtatttacattaaagagaagaaagagtgcaaacgtgatcatcgtggacactgcgggcaggaaacccaacaaaacgttgttcacccaaacgtgacctgtgatggatgtgatggtcctgtagtgggaaacaggtttaagtgcctcatctgcccagattatgatctatgcagcacttgtgagaagaaaggaatccacaaggaacacaacatgatcatgttccctaccccactggtctatccacgtggccgttggttccgtaaaatgcaccatggagttcccaatttcccttggatgcagggctggactgttccacccagaggatacccctgccacaaatatcagcaggcccaagaaagcacccctcctcagaatgaaccccctgcagaggaagctgcagcctccagtgacccacagtcttctcaaaatcccaatgttgacttccttaaaaatgtgggagagagtgtggctgcaatgctgagccccctgggcattgatgtggacattgatgttgagcatggtgggaaaaggaccaaagtttcgacttcacatccctgttctgtggacggaaactcacagccaaacagctccaactttttcatggaaagccaggaaattggcagccgatctgactcttcacctaatctcatggaaactgagcaaatcgcaaaaagaatgaaagatattgcactgaattcttctcttccacaagacaatgaacaaggggaaaacagcaatggcactgcagtgggtgatgacgactggactcatgtctcatccaaagaagttgatccctccactggtgaactccagtcccttcagctcattgagacaggccagccatgttccttagatccaaatagatcctctgctgtgcccacacacgcacctacaggactgagagaagctgccctttatccacacctcccaccagaagcagatcctcgcctcatagaaaccctttcacagatgctgtccatgggcttctcagatgaaggagggtggctcactcggctcttggaggcaaaacaatacgatattgggtctgctctggacgccatgcagtctatccgccacattcctaactcctaagcaatacattgagtttaaccattctgttgttctatttctattccttgtattatcatatgtttattaatgtaatctgacttcacacactgttgcgacttgcggaaacaagggagacaaatcctttgtttctgttggaagttaaataaaagtttttgttcctgctctagagcattcatttattttaaggtataatttctatgattttctccttccagagtcagtcaagcaaaggatactgttacctgacaaatattactgagtatgtaaagtaaaataagagttacctttagtaccacttttaaatgtgcctgtgttatagtctttatcctggtaatgaacataaaatcactcttttcagagtgtgctgttcctgtacgcaaaataacattgctcaataaaacttttattcaacacaaaaaaaaaaaaaaaaaaaaaaaaaaaa

SEQ ID NO: 56 - DNA, 3703 bp, Xenopus laevis
accgagaattccataggaaaaaaacaggactctcgcggaattgccagcctcagctctcctgctgggatcgcatgaacagccggacactgaaagagcagagagcatggagtcccaggtgaatttgtgtgtgagctgtaatggagaatcccaaaactttctagtgtctgactctgaaaatacaacttgggctgacgtggagacaatggtgcttgtctcttatgatctgaatgacatccagataaagtacatggatgaggataatgaagaggtgtctgtgaacagccaaggggaaaatgaagaagctttaaagagtgcagtgaagcagggaggacttcttcgaatgaatgtgtatgaaaagcaacagcctagcaagagtgaagagcctgcaaactttgcagaattgaaaccactggagcccaaaaactcttctgctgtcacaattggaaagagaccactggggaattattccttgttggcaaggacaatggggcaagacattcagatggcacaagcttccagtaatgcaacgagtgcagtgaatcaaggaggacttctgcaaatgaatgtctatggcaagcaacagcttagcaagagtgaagagcctgcaggccgtgaagaacttaataaacccctggagtcaaaaatctccgctgctgtcacaaatggaaagagtccactggagcattattctattcttgcaaggactttgggacaagaaatgcaaagggcaagaacttctagtagtgcagaggagcagcttgcaccaactgagaccaaggaatcaactgtaatcccaccagactggtttgccagttatatggaaaaatttaaggaacaaatcatacttgaaacagtggaaagggtgacccagtctctaagagagaactcgatatccgactccagcagctactcatcgatagataaagatccaggaaggcccgctcttcttgaagatctgtatgactggcatctgctgtgcatcaattgtaaacaacagataattgggatacgctatcagtgcagcacatgtgtatcctttagcatctgtgagcattgtgaagctgaaggctgcgaccatgaccccagccacctatacttaaaaatgcggagaccagtagaggccagaaaagaaagccttctttcttaccttgctacccctaaagaacaatccagaattcctatgcagccatgcccacagatcattcccactgtcagtgccatctttgtggatgaaaacttacctgatggaacacatcttcagccggggactaagtttatcaaacactggaggatgaagaacactgggaatgttaagtggagtttagatactaagctgaggttcatgtggggaaacctgacattagcatccacttcatgcaaagaaactccagtcccttccctgctccctaatgaggtgggagttttgtctgtagaatttattgccccagcgctggaggggacctacacctcccactggcgcctgtcacataaaggagaacactttggaccacgaatttggtgtagcatcattgtggatactattgcgtgtaatgacatcctggagcatacagtgaaaggcctttctaccagggggattaaccaacaagaggatgtttgcactggatctacaaaccagaatggagactcactgatccaggatttggccagagcccccactcctgagacaaaaaggaatacaaactctgacagaatactgtacattccatctgtggatcttctcactgctcaggatttgctctcattcgagttgctggacataaacatcgtccaagaactggaacgtgtcccccataatactcctgttgatatgactccctgcatgtctcctctgacacacgatggaccattaattgaaaatgcaggtttgggacaaacagtagaagaaagtgaaatggcttcacagaagatgcataatggactaagtaagtcccccgaaaacagagagaacccagtggcacaggatgaagatatcagcggaactcagtttgtgtgcgaaaccgtgatcaggagtctgacgttagatgcagcaccagattacaacctgccacaaaggaagacctcaacctgcagttcactacagtctatgccacattcaagttgtgactacagcgtaaagcatgaaaagactttagttcagaattcctctgcactcacttactcagaacccgtagaacataagaatgtggatgctggaaatcaacaggagacacttcctacagagccatgtcctgttgatttatatgaacaaaacatgaaggaagatactaacgatgaaacagggagccagggatcatgtgattctacagaggactacatcattatccttcctgagtgttttgacacatctcgcccattggaagagtccatgtacaattcagctctttctgagacaggatgtgacacggaaataaagacaggggcaaaagaagatgaagacaatggtcagcagtccccgtgtcacagcatcaatgacattttcactatatcacaaaccttagatactgtcccacttacaccagaagtgatgagaccatcaccccaaacaagggcattgcatgaggctccaggagctgctttatctctgacaacagaagctgaacctacaaccatcaggcaatcctttccagagcaaaaaaaccaagattcttcagatgaaaatgcaccagcgttagaaactaccgctttcaccccagcacccaatgaacagactgaacatccaagagctgtcagcattgccgggggtcttgtaaaaggagctctgtcggttgctgcgtctgcttataaggctttattctccggtcaacaggagacaaatctgccaagaaattcagaagaacaagaaagagcaatgatggctattctcttcgagatgggattctgtgaccggcagctcaaccaacgcctgctacgcaaacatgacggcaacctcatggacgtagtgactgagctgatccagatcaatgacaacgactggtactctgctcgttactgagccagacaagggagcgcagttctgtcattagtcattgaagttaaaaagatgtgttttgctagcactgcattatacatctgttttttttttctatttgacccttcaatttccatctgtctttcattctacctaccacacgtcactgatggtgaattgtggagtaaagagataactgacccttctgctaaaattctatggaagtacaatctgtgcatcagaaagtgtttccagctatatggataaacgtgcaatgtgctccctctggttttggctgacacagactttgtgttgccagattgcgtggctgaaactggaatagggagtatcaatacacagtatggaaatcagtttcccaactttttaggaagtaattctattacctgaagcaacattaatttaaaggctcagaatttgtgtttcttggaatactgaaagagtgtgctgtctgtggagattaaatttaagggcaataatgggataatcctggcaagatcacactgatatggtggagcggaaaatctgcttttgtaaaacggacattttagattgagtatttgtgtaaatagatgtggggaaaaggtgattcattagatgagcaaataaatgaatactgtaatcaggagccacttttggagtaatcaccagcagatgaataaaatacttatctttcactctaaaaaaaaaaaaaaa

SEQ ID NO: 57 - DNA, 1484 bp, Xenopus laevis
cagaagtccagcgagtggtttagcagcgggccgcagtcatggggatcctggaaaagatttcagagatagaaaaggagatcgccaggactcagaagaacaaggctaccgaataccatctgggtctgcttaaggccaaacttgcaaagtaccgatctcagcttttggaaccgtccaaatctgcagccaacaaaggagagggctttgatgttatgaaatctggagatgcccgggtggctctgattgggttcccatccgtgggcaagtctacctttttgagcttgatgacatccacagctagtgaagctgcatcctatgagtttaccacactcacttgcatcccaggagtaattgagtacaagggagctaatattcagcttcttgatctcccaggaattattgaaggagcttctcagggaaagggaagaggtcgtcaggtcattgcagttgcacggacttcagatgtggttataatgatgctggatgccacaaaaggagaggttcaaagatcattactggagatggagttggaatcagtgggcattcgcctaaacaaaagaaaacccaacatatattttaagcccaagaaaggaggaggaatctcatttaactccacagtacccctaacccaatgttcggagaagctggtgcagcttattctgcatgaatacaaaatgttcaatgcagaagtactgttccgagaggactgcactcctgatgaatttatagatgtcattgttggaaacagagtttacatgccatgtctctatgtgtataacaagattgatcagatttccatggaggaggtggaccgactggccagacagccttacagtgtggtgatcagctgtgggatgaagctaaatttggattatttactggagatgttgtgggaaaaccttgctcttacctgcatttacacaaagaaaagaggagagagaccagattttggtgacgcaatcattatgcggaaaggagcttcagtggagcatgtgtgtcatcggatacacagaacccttaccagccagtttaaatatgccctggtttggggcaccagcaccaaatacagtccccaaagagtaggcctgacccacaatatggaacacgaagatgttatccaagttttcaagaaataaattgatttaagcacatcacattcttccatctccagagaagaagccatttctcccagtgtctttccatctgtttgcagaaaggattcatgtcaattgaagactgtggaaagattttactggcgtgaaaaatgaaaataggaacaacttattgaaaagtgacttgaaaccaattttgttattggcttattgtgcagctaacaagcacttgggggggaaataatctttccaaaggacttccataggtttcactgaatggcactaaataaatggaatcagacttggagctttaaaaaaaaaaaaaaaaaaaaaaaaaaaaaaaaaaaaaaaaaaaaaaaaaaaaaaaaaaaaaaa

SEQ ID NO: 58 - DNA, 4649 bp, Xenopus laevis
ccctccaggaaaaggaacaaacaactgaaagacagtcaggacattagccacccagtgagccgggggaatcggacacaacgctggctctgctcgagcaataagcggagagcgagacaatgaaatgaaaaagttggaagcagagactgcaggagaggagcacttctgcttatagagagcacagctgagaagcacaagggggagaggggtttacagggggtccgcacaaggacagacataagggtaagacataaagtacatgaaaaggctagacgggctgctctacttatacctttacaaggcccagggaaatgaaacagctggagaagagcaagccaaagaagactttaaatcagaacatttagactgacccatttacaatctgacaacacaaaaggttaaattaaatatgactgcatccaggccaaaagcactgcaaacattttgccttctgttacctcttctggtttggatggtggaccgctcattatgttacaagccagtcattgtggtccatggattgtttgacagctcagccaactttaagaatctcttacagtatatcaatgagtctcacccaggaaccaatgtcacagtcttggacctgtttgataacaaggagagtttgcagcctctgtggaagcaggtgcaaggtttcaaagaagcaatctatccaataatgcagaatgcgggcagggatggtgtgcatctgctatgttattcacagggagggttgatttgccgtggtcttttgcagaccatgccagaccacaatgttgatacttttatttctctctcttcccctcaaatgggccagtatggagacacagattatctaaggtatctgttccccacatacgtgaaatccaacttgtaccgattgtgttatacacagatgggtcagaccttttccatctgcaacttttggaatgatccacatcatcatggaatatacgtaaatgtcagtgatttccttgccccgttgaactctgaaaggccagaacccaatgccacagactggaagaagaattttctacgtctccgtaaaatggttcttattggcggccccgacgatggggttattactccatgggagtctagccactttgggttttatgatgaaaatgagaccgttttggaaatgaaatatcaaatggtataccaagatgacacatttggacttcgctctatggattaccgaggagcaatcactgtatatggtgtgccaggggttgttcacactatgtggcattcaaaccagacagttttcaaaaactgcattgaaaaatggcttacttaaaaccctgtcgtatattgctgctataatagggttaatccatagcaaaattatgctgtatttctggcctttctctgcaccaccaatttacatcaatagagatgtgctccatatattgggttctatatgctacctcccctagcatactaattttcttgctctgcaaacaattcaattttcccaaactctatcctaatctcttttctcctcaatgaaataagattaacctatctaaatgacacggtcccatttaatatcccaaagctgtcatctttacctgcaaatgaatccacatactacttccccaactgcagatgcctcttagtattcaatttttctcctcggtttttatcagttattgttgttcagttacagtactaggtttgccaagtcaaatgaatccatatctctcgctatgtctctcttagcatacagagcctgagtatgctttttatgaaactgtaaatgagataaatagatatgtgcccataatatctgctgatgagctgtgacgtttacaaagggccttgatttttaacactgaaaacattatttatggtctgtgtgtgtatcatcaaatgggtaaaagattagatgtatatgacaaactacttgtgctggaagcttggggaaatggaatagcagagtctcccctctaaggtttttttaaattctttaaattagttttgacttcttaaattcgaaatcaattacacgtccatcaaggttgacgtctactctgattaaatcagatctgacagctttctttttctgtcaaacatcacacattaaaggggttgttcacctttgagttaacatttcgtatgatgtagagcagggatccccaaccttttgaacccgtgagcaacattcagaagtaaaaggagttggggagcaacacaagcatgaaaaatgttctcggggtgccaaataagtgctgtgattggccatttggtagtccctatgtggattgtcaacctacattgagactctgtttggcagtacatctggtttttatacaaccaaaacttgcctccaagcctggagcaacatccaaggggttggagagcaacatgttgctcacgagctactggttggggatcactgatgtagagcgttatactctgagacaagttgcagttggttttcattttttattatttggggtttttgagttattaagcttttcagtttgcactttcctagttgctaggatccaaattaccatagcaaccatgcattgatttaattaagagactgaaatgtgaataggggaaggcctgaatagaaatatgagataaaaagtattaataacattacatttgtagccttatagagcaattgtttttttaaacaagtgactgtattagcttacctgaaaccccgggccagaaaactgcaccggctcagggttataccaatgagcaccacagatcgatcttctttcatcttcctctttcttcgcgcggctgtgcatgcacagtagaaagaaaagccgaactttaactaaaaagtcggctatttcattctactgcgcatgcgcctgcccggggaaatttgaagaaagaagaagacggaagaagatcgctcagttttctgccgataggagcaccggcccgggggtttcaggtaagtaaatacaatcacttgggggtgcctaacatttggcacccccaagtgcaaacagccttacctttaattgggtcagtgacccccatttgaaagctgaaaagagtcagaaggggggcagataattcaaaaaatatttaaaaaaaaaacaaataatgaagaccagtagaaaagttgcttagaattggcaattctataacatactaaaagttaacgtaaaggtgaaccacccctttaatgatataaatgtttgtctgttattcagctaggtaaaagaaacaactagctgtaatttaaataagtgcaatgagagagaaatccacgccaattataccctaaacaatgtgcatgttgggcaattcatgaggtggctgtgttgcatacctatgaaacatgttaagagtacattgatctggagtatgttcatgtcactgcggtgtgggagctcctattgttactatcatacccacaatattgacaacccattagtgctgtagaacacaggcgtttctatatatttatatgtgtatgtgtgctcgtgttttgtaacgtgagtagacatgctgcttttaagatacttaaactgtatgacactattatatgctcttgtgttttggtaaagctgtggatgcgatatgctaactgcagactacatgcttttgacggcttctcgaaattcctcaaatattttaaatatgtgaccgtagcttgcacattgtatagggtgtactgggtgtggtgatatctagctgctttgctagagagtaaagctctttagaatggttccatactgtatatggtactgtacttggtgaagaagacataggctagaaagggctaactacaactcctagcattttccagctgtctcgtggcatacatttcatcccttccattaactgttatcccagtgtactggttttctatacaaataccgaccacatcctctgattttgacagtgaaacaaacaatgtggacaaatctgagataggattgtaccgatatacaatttcatgcacaattggggatcctaaaaagtattattttaaatatggaaggacattctacctctggatcccaagccgtaccacgaaaaacaaaaaaggtgtgcagaattaatttgaggagctttaaggtccttcattgagaaatgtgttttacagttggaaataagtctgtaacccccttaaaagcaccatttaacttatggagtattttctgcttcataatataaaattagtgcccatggtacccaagatttaacgatatgggaaacgtgaagcattccctaagtgctgcaatagacaagccctcttcaatgcaacaacaccttcttaccacaagctcgtattttaagcggcagggtgggtggtgatttttgtacacaatatttttaacactccaggaagctcttgttcatgcaggatcagactgggaagctcaggatgtggaatatttatgtatttataactatgaaagtccgagcgtcagcagtgatagataaaatgcacaaaagctgacgcataaggaaggattgtgtttggtgtaaaatcccatatattcccaaactgctttcctgcagggaagtctttttggagtatatacattttcttccagggacacgtttactgcctactgtttagttgtactgatcatgttattctacttttttattcgttgttgtgttcaataaaacatttctgcattaaaaaaaaaaaaaaaaaa

SEQ ID NO: 59 - DNA, 3288 bp, Xenopus laevis
gtaagacaggaggctaggagcctacagttttgcgggtggtgcttactggctacaaaatgagtcaaggggacacaaactccgctgctgtccctcatgtggcagaggacttacacggagatgaccgctggctgtcacagcacaatagatttgtcctggactgcaaggacaaggagccagatgttctgtttgtaggtgactcattggtgcagctaatgcagcaatatgaggtctggagggagcttttttcgccactccatgcattgaatttcggtattggaggtgatacaacccgtcatgttttgtggagacttcagaatggggaactagagaatatcagaccaaaggtcattgtgttatggattgggaccaataatcacgagaactcggctgaagaggtggctggaggagtggaagccattataaaactcatcaacacactgcagccacaagccaagattattgtcatgggtttgctgccacgtggcgaaaagccaaacccactccgcgagaagaatgctcgtgtgaatcagatcatacgctcatggttgcctcgtttgccaggggtgcagctgttagatgtggacaatggttttgtgcactcggatggcgccatctccaggcacgacatgtttgatttcctccatcttactgcttccgggtatgcaaaagtctgcagaccactctatgaactaatcatgcaacttcttgaagaaactccagaggaaaagcaggtcaccctagcctgacccctgctttggctccatcttcgttgtccgttttacaacattggctgcccctcatgctcaatgcaactgcatcagctgtatattgatatgcgcagtgtgtacacacaagacttgcattcacctgttccacatcttcctataaattccctttactgtctgtctttgctaatggcagtcctaataatgcctcctctgcagatcctgatgtgtaatgtggagttcaggtttcccagaaaaggcaacagcatgataatttattaacaatgaagggcattgtataaaaccaacaacacttgtggtttaccatgccagagtaaacggtcataaaaccagtagaaaggcatgtaaaataattatattttattctctaaaattgttacattttgaggtatcactaaaacatctgccagtcttactttttaacagtgagactgtcaaatgtatcactggccatttaacagggtggatttttgtttttgcaagcactgagtagataatggtctgtgtgtgcatttgactgctgtgcttcttaaaacaaactggcataaaaggggttaaatgtagaaacatcctgctttgagtaggcagccctttttctgccagactagttctgacacatggcaaacccttgtaatttgttttatatgatattttgtcctgtgtctgtcttaaccttgagcagggccaactcaggctggaactttgtatatattttgctcgtatgatttatgtgtttgagaatctctggcctgtccaagggaccaacagttccatggatcaacacaaaaagaagcagacttataaatgtggtggaattttcttatggattgttgcaaactgagaatgcagtgcatcgtactgtgctatagagagagagaggggaagcataaggtaggctggaataaatattttaaagtcatccccttactttattacagatagtaaagggcagcggttgtcaaacgttttcatctcaagaccctcttggaccagttatctatagattatccatagtttgaagaatatctacaagtttaccaaatctctaactgaatttaccaaatctcttaactgaactttaagctgggctcttgtgcatttatgtgaaacttaacattcagttaagactccatacccttactggcccaataatttggcaaccactggtgtaagcaattaatagtttacttgaaagggagctgtccaattttgaagacggcatgtgttattataaagtgacttgtatgcaagctttctttttttcacaaggcattatttattggattgtggctgaatattctaaattaagctgtccgtttgggaattttttttcctgatttgtttgactgcttaggtgtgccccatatctacttctcagctgaaattctgctggttaacaaaatgttgtctacattaaaggcatcattaagagtatggttgttacaaggaaaaaatgagtgatttagattggccggcatgcttcgtgggcttttttgaataaaatgtttaactatgttctataagtaaatcccaataattgttaaaggggtgcgcaacccgtaaaacattttgcataataaaataacatgtaattctgagcaactttccaatatacattaattacacaatatcaatggattcaaggttatttatcatttatttactattgagagcaatgtagggctgaatgtttacaatctccgtacccctggctgaaatgtttcaatgtaatctttcctaccgcacacctgtagttcaccagtcctgcaatggtggtgcgttcttccgttgacccggcaggatgtttggtggctaaataaaacgggatactccccgactgcattaacttgagtgtgtgcggatccgtttctatacgtatgaaatgtttcaaaccagacctggaggtgaactgacactgttacaatgttcctggcctaaaaatggaaaaggataaacaaaaatgtttataaaattgcaatttaattaacaaatatgttttggaaagttgtttagaattacatttcattatttaaaaaaaataaaagttggttagaatatgccttttaatcaaaatcccgtacatatacttttattttttttaggaaatgatatataaccaacatatatatatattctttaagttgcatagacattgactatcccacggcagcccaattctcttattagcatcatgccattgtgttcttactgaaattaaattgtgtgtgtaggatatctattattttgttataaaaatatatatagttctatattttacagcctgggactacagctaaggcatctttctttaaaagggaccaaatttgatttacagtcagcatttggggaggatgggttccctgtactgcttgaaattcctctgtctgtgttttagctctgtatagcttacagtcttcttttattcttgagcttgcatttctgtgtatgacaaatgtgaaatgatccaccctctattattgtgacagatgtgtatggagcggcgttataaaattcatatttgaatgttaaaaaaaaaaaaaaa

SEQ ID NO: 60 - DNA, 1911 bp, Xenopus laevis
gtgagcggcagatgtgagtctccgtgttaggagattgaatgcagtgctagagtatggagaaagtagtagtgagttatggagatgccctcctaaggtcttcagatgttgccctccttgatccaccccactggctgaatgacaacatcattggatttacctttgaatttctggcttcgtctttgcctcctttgcaagctcagcaagtctcattcctcagccctgaagtgagccagtttatcaagtgttgtggaaacgaggccccagatttcctggaaccattggacctgcccagcaaagaacttgttctgattcctgttaatgataatacaggccctgaagctggagggacccactggagccttcttgcttatattcaacgccaatctgtttttctacattatgactctgcccctggaaccaatgcaccacatgccagacttatggccaagaaccttggtgcacttttgggaggaaaccaaaattacagagaagaagatgcccctgtccaacacaacagctatgattgtggcatgtatgtggtgtgtgtggcagaagcattaagtgaacagcctctgcatggtcatgatagcacgttcctgtgcaagatcacaccccagtttgttacccaaaagagagtaaagtggaaagatatcataagagggctaagctgtaagtcactcagtcgaaatatgcaataggccatttccagagacattgagaattgttgaatagattgggggaaatactattcttttaatcatgtgccatctaggaacagaagcctataatcatgagatcagttttagtgagattcgacagctgctcaagactctcaagtcaacacatttctaataaaaaaagtttgctttaggtctaataatatttagagtgaatttgctacaacctgtagtagattgtcatcatgtaaatgtaactttatgaattactgttttaatatttacaaataaaatatgggctagggaatgtgcagtgatcagtccacccttttctgtatgtttaaagcagatttagccagatctgcgtgcttcccatactttaataagccttggagtgccgctaaacccctttgtattttagcagttactcttcagaaaggaagccaaacttccaagaatggtgatttttttatttttgtgcttaataatttgtctttactaaggaggggcttttcccaagaaatcaaaaagtagtagttttgattgctgtagaggtttttcactgaagtggtaaggtggcttggcatcctaaatttattgaacgctgggaaaaaaattgttggtgaaaagctataaaaactatttactgagtttcaaggattttaaaggaacacatttatgaaaggttgggtgggttcggtcgaacattcccacagagtcgtgggcaggtttggcctgattcacttcctgcagactctttttgtaggcgcatgcctcccctccccttttgtgatgtcagtgatggtgcaggtctataaatagaggtgacttgccgggttgggttaggagcagacaggttagggaggggtacgggtcaacgttttgtaaaacttttgagtttttatgattatttttgaaactgtaaactttcaccaacttttccctagaattgcaaatattttccagtcagctcactgataatttcctctagatcgtgtgctccagattagagcagatgatagaatttggagcatcatcaaattggcatcaatcaggcaaggtgaaaagtcatgaattttatttcacattttgaggaatctttcacaatacacacctacggtaaaatcctgcagctcagaatactttttttcccacatttttattgtgaaaaaatattaggaatgataataaataaaggaaaaaaatgttttcactggtaaaaaaaaaaaaaaaa

SEQ ID NO: 61 - DNA, 1027 bp, Xenopus laevis
gtgaaacatggcgctgcgggctttggttggtgtcaagcgggtcattgactatgcagtgaaggtgcgggtgaagcctgataagactggggtggtgacagatggggtgaagcactctatgaatcccttctgtgagattgccgtggaagaggcagtgaggctgaaggagaaaaagattgtcggtgaaatcatcgccgtaagctgcggcccacagcaatgccaggagaccatccgaacggctttggccatgggagcagaccgaggaattcacgtggacgttcctgcaaaggatgttgggagcctcggaccattccaggtctccaagatcatggcagcactagcaaaaaaagagaatgtgaatcttgtgctgctggggaaacaggccattgatgatgactgtaacgagaccggacagatgaccgcagctctgcttgactggcctcaggggacattcgcctcagaagtgaaagtggaaggagagaagttgacggtcgtgcgagaagtagacggggggcttgagaccatcagccttaaactccctgcagtggtcaccgctgacttgcgtctgaacgagccgcgttacgccactcttcctaatatcatgaaagccaaaaagaagaaaatcgagacggtgaaaccgtcagatctgggagtcgacatcacaagccggatacgtattttaagcgtggaagatcccccccaaagacaagctggtgtcaaagtagaaacagtagaggaccttgtatccaagttgaaggaaagtgggcgaatatgatgagtgaagggccactctctctgcttctagagaaacccaaaaatgaagaaaatcgagacagtgaaaccgtcagatttgagagtcgacggcacaagccggatatacgttttaagcgtggaagatccctcccagagacgagcttgttaaattcagtgctgatttttaagacaagctttactgcccgtttaagtgacgctttttacaccgagttatccaggattaaaaaaagaatcccacattaaaaaaaaaaaaaaa

SEQ ID NO: 62 - DNA, 949 bp, Xenopus laevis
cggagttcagtcacacacatacacaatcattaacaaacatgccaaaggtgaagcggagcagaaagcctccaccagatggatgggagctcattgagccaaccttggatgaacttgaccagaaaatgagagaagcggaaaccgatcctcatgaggggaagaggaaagtggagtccttgtggcctatcttcaggattcatcatcagaaaactcgctatatctttgatttattttacaagagaaaagccatcagtagagagttatacgactactgtatcagggaaggatatgctgataagaaccttatcgcaaaatggaaaaagcagggctatgaaaacctgtgttgcctgcgttgtatacagaccagagacaccaactttggaaccaactgtatttgcagggtcccaaaaaccaaactggaagtggggaggatcattgagtgcacacactgtggctgcagaggatgctctggataagcaattctaactgacttctggatcgtttaaggcctgcgaccgagattgtgtttgaaagttgtatctattctgtcacatcattttaatattgttttttgttgtttttaataaagggtgtaataaacatgacatttcatggaccaattttttgcattatttcctgttgaatcagagatctgactttatttgacaatcctatatagatctatcgttctgtccatctacttaaacagaagatgtctgcattcaaaacataacatccactttttaattttgtgcagaacagattctacaagtatgggatccattatccggaaacctgttatccagacagctctgaattacggaaaggccatctcccatagactccattttttccaaataatccaaatttgtaaaaatgatttcctttttctctgtaataataaaacagtacattgtactttctctcaaaaaaaaaaaaaaaaaaaaaaaaa

SEQ ID NO: 63 - DNA, 1614 bp, Xenopus laevis
tgcgagtgtaagcctggcctgcgctccgctctgttcctcttgctccgctcccgactgcagttccccgcggagggaggcgggacccaggcggcatggcttccgcactggagcagttcgtgaacagcgtgagacagttgtcttcccaagggcaaatgacacagctatgtgagctgatcaacaagagcggtgagctactagcaaagaacctctctcatctggacactgttctgggggctctggatgttcaggagcactctctcggggtcttagctgttttgtttgtgaagttttccatgcccagtattcccgattttgagactttattttctcaagttcaactctttatcagcacttgcaatggagagcacattagatacgcgacagatacttttgctggtctctgccatcagttaacaaatgcacttgtggagaggaagcagcccttgcggggaatctgtgttatcagacaagccatagacaagatgcaaatgaatgcaaaccagctgacctcaatccacggagatctctgccagctctctctcttagcgaaatgttttaagcccgctttagcgtacctagatgtagatatgatggacatttgcaaagagaatggagcttatgatgccaagcccttcctgtgttactactactacggagggatgatttacacaggcttgaagaacttcgagagagcgatgtatttttacgagcaggcgatcacaactccagccatggctgttagtcacataatgctggaagcctataaaaaatatatcctagtttccttgatactccatggaaaggttcagcagctacctaaatatacctcccaagttgtcggtagatttatcaagcctcttagcaatgcttaccatgaactagcacaagtctattcaacgaataacccagctgagctgcggaaccttgtaagcaaacacaacgagacctttaccagggacaacaacatggggctggtgaagcaatgtctgtcatccctatacaagaagaacattcagagacttaccaaaacatttttaacgctgtccttacaagacatggccagtcgcgttcagttatctggtgctcaggaggcagaaaaatatgtgctgtacatgatagaagatggtgaaatatttgcaagtattaatcaaaaggacggcatggtgtgttttcacgatagcccagagaaatataacaatcctgcaatgcttcacaatattgatcaagagatgctgcgatgtatagaccttgacgataggttgaaagcgatggatcaagagatcactgtgaaccctcagtttgttcaaaagagcatggggtcgcaggaggacgattcaggaagcaaaccatccagctactcttgaaacacaagatcccgctatgtattcccaacaaaggtggataatcagcaatgcaaaaaccttcagaatccccacaataaaaatacgtcttcggaaataagaaagagcagagagggagatgatcgtttctgcctggacatttacatgggaacgaaagcaaatatttataacgttttctctctgctctctatgcgttacacagatacacgtcaaggaaaaacaatcttcaagaaacaataaaaaaaaaaaaaaa

SEQ ID NO: 64 - DNA, 819 bp, Xenopus laevis
caaagatggcggatgccgcgaataagaagctcatgcgtgatattgccaaggttagccttcctggactacacaagagctctgggggcttcaagaatgccagacaggttttgatcattgatggcagaggacatctccttgggcgacttgcagctattgttgccaagcaggttctgctgggtcgcaaagtggtggtagttcgatgcgaaggcataaacatctctggcaacttctaccgcaacaagcttaagtaccttgctttcctgcgcaagcgtatgaacaccaacccatcacggggaccataccatttcagagcacccagccgcatcttctggaggaccgtaagaggaatgctgccacataagacaaagagaggccaggctgctctggagcgactgaaggtgtttgatggaatcccacctccctatgacaagaggaagcgtatggtggttcctgctgctctgaagattgtgcgcctgaagccaacacggaagtttgctttccttggccgccttgcccatgaagttggctggaaataccaggcagtgactgcaaccctggaggagaagagaaaggagaaggccaagattcattataacaaaaagaagatcattgggaaacttcggagacaagcagaaaagaacgttgagagcaaaatctccaaatacacagatgttctgaaacaatacggcatacttgtctaactcctctttaaagtgtgtaataaatatggaactgaaaaaaaaaaaaaaaaaaaaaaaaaaaaaaaaaaaaaaaaaaaaaaaaaaaaaaaaaaaaaaaaaaaaaaaaaaaaaaaaaaaa

SEQ ID NO: 65 - DNA, 1137 bp, Xenopus laevis
cttcaggccttgtgtcagccatctgcctccatccttagtcggtggagcggtttcaggctcatcacagccatgactgagcaaatgacacttcgggggaccctaaaaggccataatggctgggtcacacaaatagcaactaccccacagttcccggacatgattctcagctcctccagagataagtcggtgatcatgtggaagctgacacgtgacgaaacaaactatggcgtccctcagcgagctcttcgtggtcactctcacttcgtcagtgatgtggttatctcttcagatggacagtttgctctttctgggtcctgggatggaacactgaggctgtgggatcttacgactggcaccaccacacgccggtttgtaggtcacaccaaagatgtcctgagcgttgctttctctgctgacaaccgtcaaattgtatccggatcccgtgacaaaacaatcaaactgtggaacacattgggtgtctgtaaatacactgtacaggaggaatctcatagtgagtgggtgtcctgtgtcaggttctcccctaacagcagtaatcctatcattgtatcctgcggctgggacaagatggtgaaggtctggaatctggccaattgcaaactaaagacaaaccacattggtcacagtggctacttgaacacggtcacagtgtcacccgatgggtctctgtgtgcctcaggaggcaaggatggacaagcaatgttgtgggacctgaatgaggggaaacatctgtatactcttgacagtggtgatgttatcaatgcgctctgcttcagccccaatcgttactggctgtgtgctgccactgggcccagcatcaaaatctgggatctggaaggcaagatcattgtggatgagcttaagcaggaagtgatcagttccagcagtaaagctgaacctcctcaatgtacttctttggcttggtcagctgatggacagaccctatttgctggatacacggacaacctgatcagagtgtggcaggtcactattggcactcgttaaaacgtatcaaggatctttggttgtatggcagacttgaatttaaattgtctaatctgtgcaacatcaaacacctgttaataaagagttgctataaatgtaaaaaaaaaaaaaaaa

SEQ ID NO: 66 - DNA, 1080 bp, Xenopus laevis
gttcggagccctggtgtgagggaatatctggtctttaaacccttttgtggcaatccttggaagcactgacaagatgcccagggaagacagggctacctggaagtccaactatttcctaaagatcattcaattgctcgatgattatccaaaatgcttcattgtgggggcggacaatgttggttcaaaacaaatgcagcagatccgtatgtccctgcgtggaaaagctgtggtgctcatgggaaagaacacaatgatgcgcaaggctatccgtggtcatctggagaacaacccagctcttgagaaacttctttctcacatcaaaggtaatgtgggctttgttttcacaaaggaagatctcaccgaggtcagagacatgctgttggcaaataaggtgcctgcctctgcccgtgcaggagcgatagcaccttgtgaagtcactgtgcccgctcagaatactggactgggccctgaaaagacctccttcttccaggctttgggaatcaccactaaaatctccagaggaaccattgaaatcttgagtgacgtgcagctaatcaagaccggagataaagtgggtgccagcgaagccacactcctgaacatgttgaatatttctccattttcttatggattaatcattcagcaagtgtatgacaatggtagcatctatagtcctgaggtgctagatatcactgaagaggctttgcatgttcgcttccttgagggtgttcgcaatgttgccagtgtctgccttcagattggttatcccaccgtagcctcagtgcctcactccgtcatcaatgggtacaagcgtgtccttgccattgcagtggaaactgactacagcttccctctggccgacaaggtcaaggcattcctggcagatccatcagcctttgttgttgctgctcctgctgctgtggcggcggctgctgctcctgctgctgaagccgcaaaggatgaaaagcaagaagagtctgaggaatctgatgatgatatgggatttggtctctttgactaaactttgattgttccaacataataaaataaagactcttacaaaaaaaaaaaaaaaaaaaa

SEQ ID NO: 67 - DNA, 2044 bp, Xenopus laevis
ggctctgcgggacttttaaactgcgatccgggactgcgggctgtgttcagagaagagggaatgctgggagctgtagtagaatagagggcgagctgccgctttctgcgtctttagtttcctttgcggggtccttggcactgagtcactcagcgggaaactgcggctgcaactctgttccacctggatcccagcagaatggaggcatcgtgtctggagctggccttggaaggagaacgcttgtgtaaggctggggactgccgagccggggtgtctttttttgaggcagcagtgcaagtaggaactgaagatctgaagaccctgagtgccatatacagccagctgggcaatgcctatttttatttacatgaatacaacaaagctttggaataccatcaccatgacctgactttagcaaggaccattggagacagacttggtgaagccaaagccagtgggaaccttggcaacaccctgaaggttctgggtaattttgaagaagctgttttgtgttgtgagtgtcacttggaaatctcacgtgagctctatgataaggttggggaggcgcgagcactgtacaacttggggaacgtgtaccattcacagggcaagagtctggcctgcacagcaacacaagacccaggagaattcccagaggaggtgaagacagctctgcagagggcggtggactattacgaggccaatttattgattgtaacagatctgggagaccgagcagcccagggccgtgcctatggaaacttggggaacactcactatttgctcgggaacttccgaaaggcagtgtcttcccatgagcagagacttctggttgcccgggaatatggagaccgatctgctgaaagaagagcctacagcaacctgggcaatgcatttatcttcctaggagagtttgagatggcagcagaatattacaagaagacgctacagctggcacggcaaatgaaggacagagcagtagaagcacagagctgttacagtctgggaaacacatacactctcctgcaggactatgacaaagccattgagtatcatttaaagcatctcgccattgcacaggaactgctggacagagtgggagaaggccgggcctgctggagcctgggaaatgcatacactgcattaggaaaccacgacgaagctgtacattttgcagaaaagcacttggacatttcaagagaggtatgaaatagtgatgtgtgggccggcttgaagcctgcgggttgggtgggttcaggccaacttccacacgacatccttgggtgggatcggctgcactttagcctccattatccccgcccacagctgccttctgcctcacttgcgcctctgcgtgtgacttttaatatacttacacagaccagccccttttgtgatgtcacagcgggtggggcaggcacaggtatataaagaggggagcacgccgtgttcgggtcaggtgtgggtcctttttctcaacctgcacgtcactagtatgaaagctaaattagttgccatcagaattttactgtattgtttgccttattattacgtacatgccttgtctagggaataatgtgtgagataacagggaatattgtggatgtgggatacaggtgtgatgtagccattctgccaatataccaacctaaacctttgaaattaaagggctggttcacctttacattaacttttagtatgttatagaatgaccaattctaagcaacattgtaattggtcttcattaattattttttataattctttatttgccttttttcctgattctttccaacttttaattgggagccactgatcccattaaaaagaaaagtgattgccctgtaaagctacacattttattgttattggtactttttgttattcatctttccatacaggctgtgtcttattcatattccagtctcttattttaatcaatgggtggttgctagggtaatttggactctagcaatcgggttgctgaaactgcaaactggagagctgctgaattaaaggcaaaataaataaaaaaaaaaaaaaaaaa

SEQ ID NO: 68 - DNA, 2188 bp, Xenopus laevis
tgaaaggagctaattctaagcgcggttcacttttgtgatcgtggtgagcagtatgaagtatatactggttacaggtggagtcatctctggcattggcaaaggggtcattgccagtagtgttgggaccattttgaaatcaagcaacctgcatgtgacttcaatcaaaattgacccctacatcaatattgatgcagggaccttctccccgtatgaacatggggaagtatttgtgctggatgatggaggtgaagtggatctcgaccttggcaattatgaacgttttctagacattcggttaacaaaagataataatttaacaactggaaaaatctaccagtctgttattaacaaggagagaaaaggcgattaccttggaaaaacagttcaagttgttcctcacatcacagaggcaatccaagagtgggtaatgagacaagcgcttattccagtggatgaagatggtatagaaccggaagtctgcgtgatagagcttgggggcactgtaggagatatagagagcatgccctttgtggaagcatttcgtcagttccagttcaaagctcgcagagaaaatttttgcaatattcatgtcagccttgtaccacagcctagtgctactggggagcagaaaaccaaacctacacagaacagcgtgcgggaactccgtggactaggcctatcgccagacctggtggtgtgtaggtgttccactccactagacacttctgttaaggagaaaatatccatgttctgtcatgtagagccgcagcaggttatctgtgttcatgatgtctcctcaatatatagagtacctcttctgctggaggaacagggagttgtggactatttccgccagcgcttggaccttcccattggtcgccagcctcgaaggttgctcatgaaatggaaagagatggcagacagatatgaacggttgttggagtcctgcagtatcgctttagtaggaaagtatactaaattctcagattcctatgcttctgtaatcaaggctctggaacattctgcactagctataaaccatcgtctggaaatcaagtatatagattctgcagatttagagcaagaaacccttcaggaagagcctgtgcgttaccatgaagcttggcagaagctttgcagttcagatggcatcttggtacctggaggatttggggtacgaggaacagaagggaagattcaggcaatagcctgggcgcgaaaacagaagaagccttttttgggggtgtgtttaggaatgcagttagccgttgttgaatttgcacgtgatgtcctggactggaaagatgcgaattccacagaattcaaccctaaaacaagtcatccagtggtaattgacatgcctgaacataaccctggtcagatgggtggaaccatgaggttaggcaaaagaagaaccatctttcattcccagaattcagtcatgaagaaattatatggaggccatgagtatgtggaagagagacaccgccacagatatgaggtgaacccagaacttcgaagagaactggaagctcgaggcttaaagtttgtgggtcaggacacagaaggagaaaggatggaaattgttgaattggaggatcatccttattttgttggtgttcagtatcatcccgaatttctgtcccgtcccatcaagccctcacccccatattttggcttgttactggcttctgtgggaagactttctcagtatatagaaagaggatgccggctttcacctagggacacctacagcgacagaagtgagaacagttctcctgatgcagaaatagcagagctcaagttaccgatgattgatcacgaatgaatgagggaaattatttttggaaatgtggattatttcattataatggagtctatgagagatggccattacataattcagagctttctggagaaccggtttccagataacggatcccatacctgtatttggattttgtaagatttacaccggttggagaacggaaagaaacgcctcactgcagtatcttgaaccagaagactatttaaaagatctgtagttttatagcagtaaaggagtgttcactaaatgaggagtcctttacttcaataaaactaaattttgcttcacaaaaaaaaaaaaaaaaaaaaaaaaaaaaaaaaaaaaaaaaaaaaaaacaaaaaaacaaaaaaaaaaaaaaaa

SEQ ID NO: 69 - DNA, 1151 bp, Xenopus laevis
gcggcactgcagcaacggcaccaacaagagcatcagcagcagctccatcagcccttacacacccaccgctccggctccctccagcaccatggccagcaccctctcagcctacaaggagaagatgaaggaactttctatgatatcaatgatctgctcttgcctctactcccaacctcatcccaagactatctatcaatatgaagacatggaggtgaagcagttgaataaaagggcatcaggacagagttttgaagttatcctgaagccacccacagacttatcaccagagagtcctcctctcaccacctcaccaacaaagaaggacatttccctaatggaacttcagaagagactggaagctgcagaagagaggaggaagacccaagaagctcaggtactgaagcagctggccgaaaagagggagcatgagaggtatgttctgcacagggccatagaagacaacaataacttcagcaggattgctgaggagaagttgaactataagatggaactaagccaggagatccgagatgcaaacttatctgccctgagggaacgtcttcgggagaaggagatccatgcagaagaagttcgtaagaacaaggagcagcgagtggagatttctggataagatctaatcacaagctttcctgccatgtcatgacaaaaacaaaactatttcacctacatgcaacctcatatgtctatatcacaagccttgggcaatgtttgtctgacccaccatctctgcctagctcttatccaccagacacacccaacctgcaaggggagagctctaggaaatcatgatatgcatcacacccttgcagattcccattagaattcacatgaacgaggaagctttgcaggctggggttccctgacgtttggaagatgtttgtgtttaggaacagaagcagtagtgtctggctactagttactctgtgtgactgtgcctttagcttgttagacttattttcagtggccgtctgtctcacaccaacacagtcacatagctggtaggactcctagtctattcattgtcgctggttatgtctgtgcaagatgaaaaaaacgtgagactgaatatactgtatctgtacactggctgttcaataaactcattactactgaaaaaaaaaaaaaaaaaa

SEQ ID NO: 70 - DNA, 2654 bp, Xenopus laevis
gcacttgtttaagttgtgttggttgtgggatcgcaaaaaacaaaatgtcccagactgagagcatcaggggattcctggatattccagagatgctgaaatcactcttagactaccccctccctcagaatggaacagagaaagacaagaccaaattggacaaagatgatgatcatgatagtatggtggcctctgcatcactcatgccccccatctgggacaaaaccattccctatgatggagagtcatttcaccttgagtatatggacctagatgagttcttactggagaatggaatcccttccagcccaacacagctttcccaagccattcagaccattccacttatgcctgtagtggagcttgaatgtgacaatgaaccagcttcaacttcatctgcctcaccgatgtctccctctgtactgctggggaactcagaagttgaagattctgacttagaggacgaggaagaccctcctagtcctgttgatccagaaaaggtagaggtagaagtgaactttaacccagatccaacagatcttttgctctccagtgtgcctggtggggaactttttgatcccaggaagcataggtttgcagaggaggagctgaaacctcaacccatgatcaagaaggccaagaaaatatatgtctcagaagaaaggaaggatgaaaaatactggaataggcggaagaagaacaatattgcagccaagcgttcccgtgatgcccgacgactcaaagaaaatcagatcaccgtccgggcagccttcctggaaaaagaaaacacagcactgcgctcagaggtggccgacctccgtaaagagctgggcaaatgcaggaacatcatttccaaatacgaaacgcagtgtggactgttgtaagcattcttgtgtatactgaccctcttgccccaatatctttacaatcacaatgattaatagcatgggctgacagttttgtcacttactagcaaaccatattctatgtattactgaagacatagttggtgagacttctataagagagctcgtttgggctaagatagaattgtggcctctcttgcacaaggtcgaaagtctccctcccttgcaacaaagaaaatactggacatttgttgggtgaaagggaacttaagctattttggaaatcatctttgtacagcaatacaagaaacaagaactgggttcaatatgtatgttagcagaagaccaattttgttttcagcaagggttgatttgttgcccctgaaatataaaaatggtcggcaatcagaaatgtgtagaaatgagtagctgggacaataactgccaacttagacgaaaaattggagaaataaaaaagaaaagccccttaggttgacagtcttgtgctgatatgctaaccatctgactcttccaagtttttttttaatatagttaattatatctcaactacctctgatggaaagctgtgtgttttgggtaactgtatagtttcagaatgtttgcttcccccgggtattgtgtagaatttgctgatcatttgaatataaagataaaataacccaaatagtagatttctttttttttattttcactggggtactgaattgtagagtatccttattagagttttgtactgtgtgagagcaatagaaaagtatatcattgcaagcttttttattttttggaacaaaaagttcgccaggcgtgtgatacagttatgaagttaaaaatattaaatgcatctacacccaccatcatgcagcagtgccgataagcttccatttgtctgcgagcttctgagatcatgcgctgatgtccacttgttcttgtaaattcatggtccattcattttgaaatcttaactaaatcagtgaaggcaatacacacctatatatcaggagtgtctcatataacctacataactctatataactttgtttcacagagctgtctcagggtagtgcattgatccctatctgcattttgtatttctgcccaaataattcatacatttcttttcaaaagttcactatagagttgtctatattctgtgaagcatgcacatttacctaaaccaagctgtgtggcgtgaactaatattttaaacagtaatttagtaataggaaaataaggtgttttttccggttaatgctgtatggggtagttcaccttaaaattaacttttagcgttatgtatatggcagtgctgtaaaaaataatttaccaatgggcttaattcttgttttttttttatttttaaatattctgcagtcagcgatgccgtgaaagataggttgccggataaaaaaatgcacaattaatattaataataataatgccaatttaaaaagttgcttagaaaaggtcaatctgtaacattctaaaagttaatacaaagctgaacttccccttagaaggccacattttcaaggtagatctgtatttgttggcagaacaggttccatagagaatatatttatgtggtacctacagagcagctagctgcttttccacatacttgtaagagtggccggctttgtacatgtcttgatgtagatcatggaataaaattcagtgccacctttaaaaaaaaaaaaaaaaaaaaaaaaaaaaaaaaaaaaaaaaaaaaaaaaaaaaaaaaaaaaaaaaaaaaaaaaaaaaaaaaaaaaa

SEQ ID NO: 71 - DNA, 1740 bp, Xenopus laevis
gatatcttggacgtggtctgtgtgtgattccccgttatcctccgcccccagtgttcggcccgtttcctgcctgatctatattcgggcatcttttttatgaataatcaaaagcaacaaaagccaacgctatctggccagcgttttaaaacccgaaaaagagatgaaaaggagaggtttgatcctactcaattccaagactgcatcattcaaggcttaaatgaaactggtaacgatttggaagcagtagcgaagtttcttgatgcttcaggggcaaagctagactatcggcgctatgcagaaactctctttgacattctggtggctggcggaatgctggcaccaggcggaactctggccgatgaggtgattcgtactgatgtctgtgtgttttcagcacaagaagatcttgaaaccatgcaggcgtttgctcaggtttttaacaagttaatcagacgctacaagtacctggagaaaggctttgaagaagaggtcaaaaagctgttgctgtttctgaaaggtttttcagaatctgagaggaataagctggctatgctcactggtattcttttggccaatgggaatctttctgcatcaatacttaacagtctctacaatgaaaatttggtcaaagaaggtgtttctgcagcatttgcagtaaaactgtttaaatcatggatcaatgaaaaagatatcaatgctgttgctggcagtctccgaaaagtgaacatggataaccggttaatggaactttttcctgccaacaagcaaactgtggaacatttcactaaatactatactgatgcaggactaaaagaattggcagaatatgttcggaaccagcaaacaattggcgctcgcaaagagatccataaagagcttcaggaaatgatttcacgtggagaagctcataaggagataagtgtgtacgtgaaggatgaaatgaagaaaaacaatatttctgagcaaactgttattggtattctatggtccagtattatgagctgcgtggaatggaacaaaaaggaggagcttgttacagagcaagccatcaaacacttgaagcaatacagccctctgcttgctgcctttactacacaaggtcagtcagaactgactttgctgctgaaaattcaggagtattgttatgacaacattcacttcatgaaatccttccagaaaatagtagtgctcttttataaagctgaagttctgagtgaagagcccattctgaagtggtacaaagatgcacatgttgcaaaaggcaaaagtgtgttcctggagcaaatgaaaaaatttgttgaatggcttaaaaatgcagaagaagaatcggaatcagagactgaagagggtgattgaattgtatcgttgttgtcagtaaacaaacacaggagctgtagataaagtcatgtcccattatgccattattacgtgtcctgattcttacatcctacctcctgtatcaagcatgatataagggctttcatcactttttttcccccttccttcctgatcactactgtcagctgcagtttttttttttttgtttttttttgttttagcagaaagctgtccattttttttaccctctacctcctgtattttctactgtaataatgtaatttaaggcctttgaaaaattaacaattcgttttatcccttggttttctattaaaataaagtttaaaatccaaaaaaaaaaaaaaaaaaaaaaaaaaaaaaaaaaaaaaaaaaaaaaaaaaa

SEQ ID NO: 72 - DNA, 2532 bp, Xenopus laevis
cccacgcgtccgtgatgacgtttatagagaggctggctccgtttaaaaagtggcggcggttatagtgtgaggtggtaaaatattcgaacgtgaagctgccgtactaagtaatatctttgcggtatttggacgtgtaggttatttggttgattatcatcctctgcctgtctcttgtaaaaatatggagcgactagtggcaactcggttggttaccgggctggctgttaaaataatgcgcagtaacggagtaatacacaatgcaaacataacctctgtaaatatggacagatcgtcggtcaatgttgaatggaaagagggagaagcaaacaaaggaaaagaaatatcttttgcagacgtaatatctgtaaaccctgagttattagatgctgttttggctccaacaaatgtaaaagaaaacatgccaccacaaaggaatgtgtcttctcagaatcataaacggaaaactatttcaaaaattcctgctcccaaagaagtggctgcaaagaattctcttttgtcagaatctggagcacagtcagtgcttcgtgagcgttccaccaggatgactgctatccatgaaacgctaccctatgaaaatgagatggaggcagaatctactccgctacccatacagcaaaattctgttcaagcacggtctcgatctaccaaagtgagtattgctgaagagcctaggttgcagacacgcattagtgagattgtagaggaatctctgccctctggcagaaataaccaaggtaggagaaaatcaaatattgttaaagaaatggaaaaaatgaagaacaaaagggaagaacagcgtgcccagaactatgaacgaagaatgaaacgtgcacaggactatgacaccagtgtaccaaactgggagtttgggaagatgattaaagaatttcgagcaaccatggactgtcatagaataagtatggcagacccagctgaagagcatcggatctgcgtttgtgttaggaagcgaccgctgaacaagcaagagctttcaaagaaggagattgatatcatttctgttccaagcaagaacattgttcttgttcatgaaccaaagctgaaggtggacttgaccaagtatttggagaaccaggcgtttagatttgatttttcatttgatgagactgccacaaatgaggtggtttacagatttacagcaagaccattggttcaatccatttttgaaggagggaaagcaacttgttttgcttatgggcaaacgggaagtggaaaaactcatacaatgggaggtgacttctcaggcaaaagtcagaatgtttccaaaggagtctatgcttttgcatcacgtgatgtttttctccttttggaccaacctcgatataagcacttagacctggatgtttttgtgaccttttttgaaatttataatggaaaggtctttgatctattgaacaaaaagacaaagctgcgtgtattggaagatgcaaagcaagaagttcaggtcgttgggttgttggaaaaacaagtgatttctgcagatgatgtttttaagatgattgaaattggcagtgcttgcagaacttctggccagacttttgccaatactagctcctcacgttcccatgcctgtttgcaaataattctgcgaaggggaagtaagcttcatggcaagttttcccttgtggacttggctggaaatgaaagaggtgttgatacagccagcgctgatcgtattacccgcatggaaggagcagaaataaataggagtttgcttgcattaaaggaatgcatacgtgctttgggacagaacaaatctcacacccctttccgggaaagtaaacttactcagattcttcgggattccttcataggagagaattcaagaacatgtatgattgctatgctttcgcctggatttaactcctgtgaatatactctcaacactctaagatatgcagacagagtcaaagagctgagtccacaaaatgctgaaactaatgatgataatctgcagatggaggatagtggtggatcacatgcgtctatagaaggtttacagctgcaggatgacttcctgctgaaagatgaagagctgtcaacacataacagtttccaggatgctcttaaccgcgttggtgagctagaagataaagcggtagatgagttgagagaacttgtgcagaaagaaccagaatggacaaacttgttgcagatgaccgagcagccagattatgacctagaaaactttgtaatgcaggcagaatacctcatccaggagcgctctaaagtgttaattgccttgggagatagcataaattctctgcgtcttgccctgcaagtggaagaacaggccagcaagcaaataagtaaaaagaaaagatctaataaataaagtaaaacagtacaatttctgttaattttataaataccattttgttgtctgattttattgtttctatttttactctctacttatatttgttaatctcgagtgctttaaataaagtctgtatatagcataccttggtaaccagaaaaaaaaaaaaaaaa

SEQ ID NO: 73 - DNA, 2397 bp, Xenopus laevis
gtgccaacggactctaaaagtgagaaagagcggaggtacaacctgtgtgatataccattgcacgctcgcatttctagcgaggatgtcctaaaatggtttccatatccgtatgtcagtgacacagccggattccccccacgccggccccttccattctccctatacttgttccttcatagatgagtccctgtcccctttcctcgtgcacagccgcccgcctggagactagcaccacatgccgcccgggggcttcactctcctgtgtcactttcatctctgcagtggtcaccagtccatgctgtgagcctccaatagccgagcattccccaaggagaagctacgaaacaaggctgccatggctctcactttattcgacaacgacgaataccggcctcctgtatggaaatcatacttgtatcagctgcagcaagaggctcctcacccccggagaattacttgtactcgagaggtgttaaaaagaccaaagtactatggaagagaattttttggtatgatttcaagagaggaaacagaccaattgttaagtggggcagaaggaagttatctcattcgtgagagtcagaggcaacctggaacatacactttagcactgagatttgggaaccagaccaggaactttaggctctactctgatgggaaacactttgtcggagagaaaaggttcgagtccattcatgacttggtgactgatggcttgattacactctacattgagactaaggcagcggaatatattgccaagatgacgataaatcccatttatgaacatataggatacacaactctaaacagagagccagcacagaaaaagcaaatgcctgccctgagagaggcacatgtggaaaaagactgtccagtagaagatggcttatcagagaaaaggttaacctctcttgtacgaagagcgacattaaaggagaatgagcagattcccaagtatgagaaagttcataatttcaaggtacacacattcaggggccctcactggtgtgagtactgtgccaacttcatgtggggactcatcgctcagggtgtcaaatgcgcagactgtggattgaatgttcacaagcagtgttccaagatggttccaaatgactgcaagccggacttaaagcatgtaaagaaagtttacagttgtgacctgaccacattggtaaaagcacacaacactaaaaggccaatggttgtcgatatgtgtattagagaaatagagtctagaggtctctcgtcagaaggattgtacagagtatcaggttttactgatctaattgaagatgccaaaatggcttttgacagagatggggagaaggctgatatttctgtgaatgtatatgaagatatcaacattataaccggtgccttgaaactatattttagggaactaccaatcccaatcattacatacgatgcctacccaaaattcctagagtctgcaaaagctccagatcctgatgcacaactagaaacccttcatgacgcattgaagctgctccctccagctcactgtgaaacactacgctatctcatggcccatttgaaaagggtaaccctacatgagaaggacaatttaatgagtgcagagaaccttggtatagtgttcggcccaactctcatgcgagccccggaacaagatgccatggctgcactgaatgatatccgttatcaaaggctagtggtggagatgctgatcaagaatgaagacattctattttaaatatcaggaagaaatcatttgtgagatgaatgttatgttgttaataataatgttaataaataatgttaataaatgaaggatagttttgcaacatagtgagcagttcgctaccaggcgaatccctaatttcctacgtgtacagcatacagaaacgacaggcttcttgttgtggcaatcagatgtatattgtagcagtaagcttctgtaatattactgcattgtgtttacagtgtaaccactttcacatgattgcatgactctccgtttttgtcggggatttccttgaaaaacaaatactatctagaaaaaaagcctcttcccaagcaggtagtgaatgtatcatggcatgtctccccccccctgtgcaacttggtctttttgttccacccaatcagattaccacgttgagttgatctcatgaataacatctgttctgttcatttcacttctttttcttgctttgtgttttctttttgccaagtttgtgtatggtttggaagaggaaacctgggagttctgaatgttttattccttttcagtgtggtgcttgtgatttaaaatggcaacaacaattattatttttttaattgtatttttgtatttttcaaccagcatgtatgtattaatttattaaatctaggttttagaaaaaaaaaaaaaaa

SEQ ID NO: 74 - DNA, 1405 bp, Xenopus laevis
ggttctgggcggcggagaagatggcggtgtgcgcaggtattaaggtgcctcgtaacttccgattattggaagagcttgaagaagggcagaaaggtgtgggtgacggcacagtcagctggggccttgaagatgatgaagatatgacactcactcggtggacaggaatgataattggaccccctaggacaaattatgaaaatagaatttacagtttaagattagaatgtggacctaaatatccagaagccccaccgacagttaggtttgtaacaaagatgaatatgaacggaataaataattccaatggcacggtggattatcgaagcatacctgttttagctaagtggcaaaactcctttagcattaaagtcttgcttcaagaacttagacgcctcatgatgtccaaagaaaatatgaagcttccacagccaccagaaggacaaacctacaacaattaattcatatggaatgatttctgtacttcccctgttgcccccaccacatattatggatgggcctgcaatgtcagttgttgcatgcctttccacctgagagggatgacccttttggccctagcaaacctattctgggcacaatttgcacatgattcatatgcctgaatgtgtctcacagttttaaagactcccagttatggatattgtatgcaacacaagtagatgatttattctcatgttgcagcctttacccctttcattcaagaatatgtttaaattttatttggggttaaaggttgttttaaaaacaaaaaaacaaacaaaaggaatttatttcttccattataatgttaattgcagatcacagcactgattgttgaaataatcacatctcggttgtttctaaagagcagcagttcatgttctggtattaactgaaagcaacctgttcttgtgtatatgtctatataaatatatacacacaagtaaataatctctgtgctgcagcagagccccagataatatctgaaagtggtaatgttagtttcttcttactttctatccctttagctttatccctttgccacgtctattgccttttagttgactctgaatgtttcactgaccaaagatgatgcaatgatgtcagtcgtgcagcgtctacaaaaaatacagtttctcatttaggatattatggctctttcaggctgccttcccttaaattagtctttcacttgcagtttgggaggtgtatcttttattttaatatcaaattcctattttctatttattttttaactggtactcttatttgtgtttgtaggtttttgctttgcagaacatgaaatctattaaaacttaagaggcagaattcacccaaccgaaaaaaaaaaaaaaaaaaaaaaaaaaaaaaccaaaaaaaaaaaaaaaaaaaaaaaaaaaaaaaaaaa

SEQ ID NO: 75 - DNA, 2754 bp, Xenopus laevis
cggacgcgtgggtctcgctttgatggcagggtcggcccattgagctcagagctagggggggggcttctatttgtcagttctccgagccgtgagcggggtgtaccgggaagagagggggattctccagccgttcccccccgttgcagtcgcctggacccggggaaacttgttacaaagttgcctgcgtgtgaccctacggacggatacaaagtctcagtttgtgcgcacggactaggaatgatttttccaagtagcagcaacccggtgagaactccatatcggaagcagcaacccattgtgcctgctcaccccatggctcctccaagccccagcatgactggtaataacaacaacagcagcagcagtagtagcagctctggatgggatcagttaagcaaaacaaacctttacatacgaggacttagtccgaacacgacagacctggacctggtgaaactctgccagccgtatgggaaaatcgtttccacgaaggctattttggataagacaacaaacaaatgcaaaggttatggttttgtagactttgacagtccagcagctgcccagaaagctgtttctgcattaaaggcttctggagtccaagcacagatggcaaagcaacaggaacaagacccaaccaatttgtacatatcgaatttgcctctttctatggacgagcaagaattggagagtatgcttaaaccctttggacaagtaatctctacaagaatactgcgtgattctagtggtaccagccgtggggttgggtttgcaaggatggaatctacagagaaatgtgaagccgtgattagtcattttaatggaaaattcattaaacctcttcctggagtttctgctcccgctgaacccttgttgtgcaagtttgctgatggaggacagaagaagcgacagaatcagaacaaatatatccagaatggaagagcctggcctagagagggcgaggtgagatttgctggcatgacacttacatatgaccccaccactgctgctattcaaaatgggttttaccccacaccgtacagcatcgccactaacagaatgattacccagacatcgatcacaccttatcttgcgtctcctgtgtcaacgtaccaggtgcagagtccatcttggataccaccccaaccttacatcatgcaacacgcaggagctgtgttaaccccgtccatggaacaccccatgtcactacagcctgcctccatgatgaaccctttggcacagcaaatgagtcatatgtctttaagcagcagcggaacatacatgcctgcaacaacagctatgcaaggagcttatatcccccagtacacacacgtccagacagctgcagtctctgtggaggagcccagcggtcaacagcaagtggcagtagagacgtccaacgagcattctccttatacctatcaacaaaacaagtaactctaaaatggtgtcatgatcatgcctgagggagaaaaggtgcagaggctgaaacaatcatggatttttctgatcaatcgtgctttatgaattgaccgttttgcacaggttcttggagaaaacaaaatcaaaaaacattatttataatgaaatcaactcaaactatttttgctataagttctatgaggtgcataaaaaaaaaatccttcacttcatctagcgactgttcccgtgaacagttttattttattacgaaaatttttatcaagtactataaaaaaagaaagaaagactacaagtttatttctggatatgcacacgtgacacatttggatgaatccatgtgcatgaccgaagatcttgtgttatcatttttttttttacttatttttatttttttaatttgtataagaattttattttgtttttactttttcagaattttatgtttcctgaaactagccatttcagaagctgagaggccctgaatgcgccagcgaggttgtttcagctaagcatgactggttgctcagccgctgaattggtgtcaataaaaggggggcatctgcggtggtgccgctgtgtttgcagtgtgagtgttgctgttgtgcagtgttgctgtctgttgtttctgaccctttttgtcattctttctcatagcgtgaagtgtcttatctttttttaatgaattccaatttgccttaaatctttcaatgctgtagcttttttcccgaagtaattagtgtagaatgctttgaccaagttagctggtcgttatgccttgtaaaacagcagcatagggcttttaaaaaaagaaaaaaatagtcaataaaattgctgaagattttgctttttttaaaaaaaaaaaaaaaaaatgtgcagtagctgttttagatgacttttttttccacgtaatatgtaaggctttgggtaggtgggaggagggaaaatgttttgtgtgaaacactttttttctgatgggtatgttttaatagaatccgttgtttgtaaggccttatgccaatttgctctggtagtccaagcgattttaggaaatctgctgtaaaatgcaatgtaaaaacttttttgcctttttttttcccagactaacttgatgttctagttttagtgattgtagaatataggaattgggttgggggatttaatagtgaatgtgtttttttgatgttttttgtctttatacaatttaatgatagtgctttagatagtcgattgtgctgaaaatgagcaaacagaaaagtgctgttacagcaaaatgataaaaacgtacaaaaatttaaaaaaaaaaaaaaaaaa

SEQ ID NO: 76 - DNA, 822 bp, Xenopus laevis
gcaaagcccagtgtaaggcggtcggtctttgtcttgtcgctgtactccccgggacggacgggcggataccgccgggatggacgtgtttttgatgatccgccaccacaagaccaccatattcacagatgccaaggagaacaccacagtatatgaactaaaaaggattgttgagggaatcctgaagagacccccagaggatcagaaactgtataaggatgaccagctactggacgacaacaagaccctaggagactgtggcttcactagccaaactgccaggccacaagcccctgccacagtggggctggcatttcgcagctcaggagactcgtttgagcctctccgggtggagcccttctccagtccccccgagctgcccgatgtaatgaagccacaggaaacaagcggaagcgccaacgagcaggccgtgcagtagagcccgggagactgcgcgctgtttgtatccattagactccgcccactcttgtctccatgccggggtgctgatggaactcagtgctttgcgatctttgtggttccctccaaacaagtgaagggagtaatatttcttatccctgacaactcacccctccccctcaccttgttgtacaaagtgaccccgcccccttaaattccaagcagtctgcccggcattcggccccctcccatttttcaatcttccatttcttctcttgctttattcccccccccccacagatcccatttgtttgtttaggggtgggcattttggttttgattttgttctattttattttttaaacacaataaaacatttttgcctgtgaaaaaaaaaaaaaaaaa

SEQ ID NO: 77 - DNA, 2564 bp, Xenopus laevis
gacagcgaggtctcgaagcaaaattatctgctggagtgacagtcatgtcggagagcattataattcgcattcagtctccagatggcattaagcgaattaatgcaagcaagagggaaactgcagcaacgtttcttaaaaaggtagccaaagagtttggtttcaggaataatggattttcagtatatgtgaatagaaatcggacaggagaaatttctgcttcccaaaacaagtccctccattttcttaaaatcaagcatggggatatgctgttcttgttcccatctagctctgcaggcccctccactgaagtcatggatataagtgcagcagttccaggttctaggcccataagctctccacaggtggtagatgatgaaattgaccaatatctgagcaaacaggatggaaaaatctacaggaacagagacccccagctgtgtcggcatggccccatgggtaaatgtgtacattgtgttccactagagccttttgatgaggattatctcaatcaccttgatcccccagtcaagcacatgtcattccacgcctacatcagaaagctgacaggaggtgcagacaaaggaaaattcgtggccttagaaaatataagctgcaagatcaaatctggttgtgagggccacccaccgtggccagagggaatctgtaccaaatgccaacccagtgcaataacactcaacagacagaaatataggcatgtggacaacattatgtttgagaatcacaccattgccgatcgcttcctagacttctggcgcaagactggaaaccagcgtattggttatctatatggccgatacactgagcataaggatattcctctgggtctaagggcagaagtggctgctatctatgagcctccacaaattggaactcagaacagcctgcagctacttgatgatccaaaggctaaagtagtagatgagattgcagccaagcttggactaaggaaggttggctggatatttactgacctcgtctctgaagacacaaggaaaggtacagttcggtacagtaggaataaggacacctattttctaagtgctgaagaatgcattacagccggctattttcagaacaagtatccaaacctgtgtcgcttgtcaccagatgcacattttggttcaaaatttgtgacagttgtggcaacaggaggcccagataaccaggtgcactttgaaggatatcaggtgtctaaccagtgcatggcacttgtacgggatgagtgcctcctgccctgcagagatgctcctgagttgggttatgccaaagagtccagcagtgagcaatatgtaccagatgttttttacaaggacatagacaagtttggtaatgaaattacccagcttgcacggcctctccctgtagaataccttatcattgacatcacaaccacctttccgaaggatccagtctacaccttttccacttcctctaatttgttccccatcgaaaaccgggatgtcctgggtgagacacaggactttcacagtttagccacatacctttcccagaatctgtcctccgttttccttgagatcatctccgacttccatttgctcctcttcttggttaccaatgatgttatgtctttacaggacagtatcagtttgctcttagatgctgtacggaccagaaatgaggaacttgctcaaacctggaagaaatctgagcaatgggctactatagaacagctttgcagcacagttgggctccagccctcagaacttcatgattatggagccattggaggagcctcacatgctgcatcttcatccatgtggtcttgtgtgcactgcaccttcatgaaccaggctggtacagaccattgtgaaatgtgccggctgcctcacacctaaagtgaggttgcagactaggggacatgccatcaagtcctccaacagggagcaggttcctgaagcaaactttctacaagcccgtaccctagccctaccaagttggtttaagatagggagaagttcttgctgcaaaacctgctttctcacactctgccatcagagccaagggtagtgtttttacacactctgcagtctgcagctggatactgcaaaccttttgtgtttttacgggttgacttcccaaatgttcacccctgtattaccccatattcacagcattgtctgaattttgccgtggcagtaatgtaaaagccaggactagcacagttacttagttccatttactatgagaacttcaatgaaaacaataaatggaaagcacttcttaacttaaaaattcttcagatgtaaatcatagcctttgtttttcaattacttctcaatatacttagatgagcagtaaatatagcataatttcacctgctcctcatttctaagattgaaattgaccacagtaggtcaccttcttggcataataagctctcactgtccattaaaatacctttatgtacagcaagtattatttgggacacttccaagttaaaacagaattcagaataaagactgtaagaggcaaaaaaaaaaaaaaaaaaaaaaaaaaaaaaaaaaaaaaaaaaaaaaaaaaaa

SEQ ID NO: 78 - DNA, 1126 bp, Xenopus laevis
attgtaggagtgagacagcactggtggttgccggctgtgacagggtttgtgctgaacagtgattaaaatgttctcgtccgaatccattttaaatcgtgagctcaacaggagcatggattatcactacacggggccggtggagcagcgctttaacccatacacctttaatggagggactgtacttgctcttgcaggagatgactttgctctcgttgcttctgacacaagacttagtgaaggttatagcatccacagcagaaacacaccgaaatgttacaaattaacagacaaaacagttattggttgcactggattccatgccgactgcctcacactcacaaaaattattgaagccaggctaaagatgtacaaacattcaaataacaaaaccatgaccagtggagctatagctgccatgttatccaccattctctactcccgccggttctttccttactatgtttacaacatcattggaggccttgatgaagaaggtaaaggggcagtgtacagctttgatccagtaggctcataccagagggatgcatacaaagctggtggctctgcgagtgccatgttgcaacctcttcttgacaaccagatcggatacaagaacatgcagaatgttgagcagctccctctgacattggagaaggctctgaagctcatcaaagatgtattcatatctgctgctgagagagatgtatacacaggcgatgcgctgcatataagcattgtgactaaagatggcgtcagagaagagtccatttctcttaggaaagattaattcacatgcagccagtaaccaggctgttggcatcttctgaactctctcagaaaattctttgatttctgcaatgctgatcttttttattccctctaaaataaaaaccgaaaaaccgaatttcactacaaatgtatatttgttaaggtagtgtgggctgatgatccaatataccttgtttttggaacaggttataagataccggtacgggacctgtaacccaaaatgctcgggacctagggttttcggataatggatatttttgtaatttggaactccattccttaagtctactagaaaatcatttaataaacccaataggcttgaaaaaaaaaaaaaaaa

SEQ ID NO: 79 - DNA, 877 bp, Xenopus laevis
gcgaaggttttgtagtgcgggctaagagcggagggctaacatggcgagtcagtcagccggaatccagcagctgctgcaggctgaaaagagagcggctgagcgagtggcggaagcgcggaaaagaaagaacaaacgcctgaaacaggccaaagaagaggctcaagctgagatcgagcagtaccgtttgcagcgagacaaagaattcaaagccaaagagtctgctgctctcggctctcatggcagctgctcagaagaggtggaaaaagagacctctgagaagatgtccattatccagcagaattatgcaaagaacagggagaatgttctggagaacctgctttcctttgtgtgtgatatcaagccagaaatccatgtgaactaccgtgtgaatggctaaaagcagtagcagcagagtgtcagctcaagggctttcttcccctttcctcttttgtttgttttgcctcatgttatttattgtgctcttaggcactgatacctgtcattttctcagaggttaaatttacccagtatgcaaatgttcctaattggggagtgaccactgaacattgtctctcactgtaattccctgcgtgggaagctggttatacaataagccatattagaagggctaatctttgcaaaaaagaagagactttccagttcattatgtcaaaggggatgtgaaagagagttgggttgtacttggatttcctgttagcttgaggaagaagggcatgggggcctgtgttttagttagagtattcactcttaggagaacagtttgtacccgtttgtacttccatcttctttccagtagtttcatttctttcacctgctgaattaaaacattttgcactcttttaaaaaaaaaaaaaaa

SEQ ID NO: 80 - DNA, 1559 bp, Xenopus laevis
ggtgctagtcctgggagcagctccactcacagcagccgtgcctctgtctctctatctctgcagatcatgtccttcattcaagtggaagcaaattccgattttcccattcagaacctcccgtacggagtgttctcaacacacgatgagcccagacatcggataggggttgcgattggtgaccaaatcttagatctaagtgttatcagacatttatttactggaccttttgtgtcggggaatcaagatgtttttaaccagccaatcctcaatagctttatggccctggggcacaatgcatggcgagaggtgagacagtttctccagcagctgctatcagcatcagaacctttgctaagggacaacatggagctgcgatccagggcatttgtgccacaagctaaggcaacccttcatcttccagcaaatattggggattacactgacttctactcctccagagatcatgctactaatgtaggcattatgttcagagggaaggacaatgctctgatgccaaactggcttcaccttccagtgggatatcatggccgtgcatcctctgtggttgtatcaggaactccagtgcgtaggccaatgggccaggttcgaccaaatgatgacaagcctccagaatttgaggccagcaagcttctggacattgaattggaaatggctttctttgtgggttcaggaaactcgttgggaacccccattccaattcataaagctgaggagcacatcttcgggatggtactgatgaatgactggagtgccagagacatccaaaagtgggaatatgttccactcgggccatttctaagtaagaattttgcaaccaccatttctccctgggttgtaccgatggaagcccttatgccatttgttctgccaaatccagtgcaggatcctgtgccactgccctaccttcgtgataacaccaattacaggtttgatatcaacctgtgcgtctgcattcaagggaaaggaatgaagaatccagtttctatatgtaaatctaactataagtacatgtactggacaatgaagcagcagctggctcaccacacagttactgggtgcaacgtacgacctggagacctcctagcgtccgggaccataagtgggccggaccctggaagctttggctcaatgctggaactgtcctggagaggaagcaaacctgtagatctcggagatggacacaagaggacattcctgcaagatggggacactgtgactatagcaggttactgccaaggagagggttatcgtgttggatttgggacttgctccgggacagtcctccctgctcttcccctctctgattaaataaatctgcacacagaggttgcagagactggaagataaaagccaatagacatgtttacttatgaataaaatacattgactgtaattatatgaataggggaatagtagggtagttaataattgggatttgttgttgaaatagggcaccgcgttccatacacaaacagtgctgtaatgtaaataaaagtgtacataataccaaaaaaaaaaaaaaaaaaaaaaaaaaaaaa

SEQ ID NO: 81 - DNA, 1632 bp, Xenopus laevis
gcagaagccagagagagagacagagagagagacagagagactaagagtgggagagccgggctgagtgctactatctgggactgacagttgtcaggatgccatcagagcggccatttaagcacaggagaagcttcgctgagcgatgtgcagaagtacggcaaattcgtgagcaacatcccaataaaattccggttattatagagcgatacaagggggagaaacagctgcctgtgttggataaaacaaaattcctcgttccagatcatgtgaatatgagcgagctagtgaaaatcataagacgtaggctgcagttgaaccccacccaggccttcttcctgcttgtaaaccagcacagcatggtgagcgtttccaccccaatcttggatatatatgaacaggagaaggatgaggatggcttcctgtacatggtgtatgcctcgcaggaaacatttggccactgatgtcccgaggatgcacaaacgcttgcacgccaacacaaacctaacacatccaacacagctatgcacagaaatactctcgcatgttgacacttacatgtgatttcagccagacttcttgcctgtagataaataatctattcttgcactataactgcctcgcacaaatactgttacacaagcattccacttacactcgcaacgcattagtactgtgtgctcacactcatttctgcacacaaaatcatacccttcgtgcttgtatatacgagttcgtgcctgcacgcaccaaaccaatctcctggttgcacacgcacagtagtcatagtgtcacgcgtgtaacgcacataatcatagttgttaaactgcttccttcaacaaaagttctcctcttgtgtaactgtagatatcgtttttgtgacccataattgtgaggttgcacacagggccgcaaaacattttggggaaacctgtggacatttaggaacgcgaggaccactgaaccgtatagaaagaacgcctttccagtaaaaatggagcccagtacatttccagccgcatcagtggagctaagggcagagacagacgaaaagatttggggagatttagtccaccactttggaaaatggagtgctccgagcgccatcccaccggtgatttagattctagctggcggggaggcagttcggggcgattagtcgcccgaagaagaggcaaatctccccgaatctccacgtatgtctctgccctaaggggtaaaggaggcagtaagcctttgaaattaaccctttgttcataaagtaaaggggttgttcacctttgagttaacttttagtatgacgtagggagcgattttctaggttttcatattttattatatagcttttgagttatttagctttctattcagcagctctccagtttacagcgtcggcaattccgttgatagggtccagattaccctagcaaccatgccttgatttgaatgagactatggagtattaatagtggagggtcggaacagaaagatgagtaataaaaagtagcaataacaataaatgtgtagctttagagaggatctgtttttagaggggggtcagtgaccccttttgaaagctagaaagcgtcaggagaagaaggcaaataattcataaactataaaaaaaaaaaaaaa

SEQ ID NO: 82 - DNA, 2142 bp, Xenopus laevis
tgcgcaatggccggagtagaagactggattagcgctccgctcgctgtggtgcagggtttattctctcagagacaggcgaatggagactgggagaagaacgttaccgactacttccatgataaactacaggggaatcgctctcccgcttctgtgccgtgtctcaatgacgtccccctgcattacctgaagccaaacagcctggtgaggttccgctgcatggtgcaggacatgttcgacccggagttctacatgggggtctatgaaaccgtcgatacaaacaccagcgccagagttctgcatttcgggaagtacagggatctggccgagagcctgccgcagcaggaggtggatctggactctcgtcgcaacgtaacctgcgagagacaaaccttctactgtgtcccggtgccgggggaatccccgtgggtgaaggacgcctacaccagctccagccaggcaagggcctgcgcctccacctcctacacccccagtcggcagaagaggagctacgaggaagatgaggacgtcggcccatgtgacactcgcacttcccatggactaggggaaccaaaacgattggagactgaagctgcgggacttcagcagaaccaaccttccagctgctcttctgcccccgacctgaacttccctctacccggcgagaaaggacctgcctgtctcataaaggtgtatgagggttgggacagcttcaaggtgaacgatattatagaggtgtatggaatcttatcagtggaccctgctctgagtgcggtgaatgaggacagagatgcagtgtctgccctgctggacccgtctgataacatggaaaccctggaggaacaacgtgctcactgccctcccgcctccctggtgcccagaattcactccgttgttacatggaaactgcaacacaataaccccctgctgcccggcaccctccaaggcacagaggagagcaagctgtttgtctccaacctcctgtgtgaagtgtcagctgtgagggccgagctcctgggcttcctgtcacatgcgctgcttggggacagtctcgctgccgagtatctcattattcatctcatctctacagtatatgctcggagggacgtgcttcccctgggaaagttcacgttgaacctcagtggctgccccaggaacggtatcttttcagaacttctgtaccgaatcctccagcagattgtccctgcggctcactacctcccaatgaccatagagaacatgaacaagctgcgcttcatcccacacaaggattacaatgccaatcgtctcaggagtggtctcttgcagttatcggctcacacgtctctgctgctggacgagactctgctggagcagggacagctggacactgcaggggtgcacaatgtgaccgcactgggaaacctgatcacttggcaaaaggtggattatgacttcagttaccatcggatggaattcccctgcaacattaatgtccttgtcacatccgaggggcgctctctactcccatcagactgccgagtccacttacagccgcagatgacgcctccgaatctggagcagtacatgggggctcttctcagcgcttctctaccctccctgctcaacaaattccgcagctacatcggcctcctgagactcctggattacagcatctctgatgagatcacaaaggctgttgaagatgattttgtggaaatgcgtaagaatgacccgcagagcattagtgctgatgacttgcaccggctgctggttgtttccaggttgttgtcactgagctcaggtcagacgactctctccagggaaatgtggctcagggcaaagcagctggaacagcagaggaaaagccgattccgagagcagaaacacgtgaatgggaatgaactttaggggtttcactcctccacacggtgctgtgcctggataaaggggaccttgtctgcttctttgttttcagcctgatacctgcatgtggcaccctgttctgctcagatcttccctgtgctctgcccatgacttactcaaggacttttttttacgaaaccggttttgtaaattttgtaattccaacaagcgtaacggaaatttgatattaaattgttaacagctaataaattaactttcttcacaaaaaaaaaaaaaaaa

SEQ ID NO: 83 - DNA, 2240 bp, Xenopus laevis
gtaagggcagaagcgagtcccgacggagcgggaaatttatcaggaaaggaggaaagcgcatcggtaccggcaagagagaagcattcattttgagatattaacaaggctgctgaaagaagaaatatgtctaaggctccgaccaggtccagtccatcacgaagagatttgtacaattttggggacacccgtgatgcaagacgtgagcgttctcctctccgtaccagccccagaagagagggcagagaagctagagatgggagagattctcgttcacttcgggatgggcgtgacacacgagatggacgggaccaaagagaggttagagagtctagagatgctcgagattccagagatactcgagattccagagatactcgtgatccaagggacttgagagaatcaagagattcaagagatttaagagaacctagagatgcacgagattacagagaacctagagatgtgcgtgatccacgggatactagagagatgagggatgccaggtctgttcgggatccccgtgatgcgagagatccattatatgaccgatacagagatctgagagacactagagacccactgtacagacgtgatgaccctttagacagataccgtcctgatgatttgtatcgtaagaaagatgacatccttttggatcgctaccgggatacattggatagacacttaagggaacctgaagatcgtttgaaacgcgaggaaaggagacgtgaggagctgtacagacactactttgatgaaatccaaagaagagttgatgcagaacgccctgtggattgctctgttgtagttgttaacaagcagtcaaaagaatatgcggagtccgttgggcgaaaggtccgtgacttaggcatgatggtggacttgatatttttgaatactgaggtgtcactgacacaagccttggaagatgtcactcgaggaggctcaccttttgccatagtaataacccagcagcaccaggtccatcgctcatgcactgtaaacatcttgtttggcactccccaagaacatcgaaacatgcctcttgctgatgccatggtgctaattgccagaaactatgaacggttcaaaacagaaactcgagagaaggagcgtgaggacattgcccgtcaggcggcaaaaatgtctgcagatgctattctgagggagcgcactctacttgcagaggaggtagtaaggggggttgcacctccaggcatacaggctgttctcgggctgcttgctgataatagatacgttactgtagaagagatagataaggttatccactatctacgtgataaaaaggaaagactacttggagcaccatctgattccttgccatcacaacttgcaagaccatcagtgggagcagctccagtatcatccctggataaccaacctagcagccaagcaattaatccagctctgcagatgacacaacccgtatcttcttctccagccgggcagtctgtgaatacctcacagcaagaacttcaagcaaaaatcctcagtctttttaacagtggcgctacagttggtgtatccagtaacagcccagccagttctgcacctgcatctgggattggctcgaatcaaaacttcggaaatatgcttaacacgcaacagcgtccaggtcaaataaacccttctgctatggcttcatctgcacaaagacctcaacttgctacaaatcagcttccagtatccatggggcctggaggtcctccaggacccatacgaggcccagcacccagacctggtctaccttcacaagctcagggtgtttatggacagcatcagaatcgccctcaagtacctgctaatgttcctaaccaaaggcctggaggttcctccggcataaactttgacaaccccagtgttcagaaggctttggacacattaatccagagtggcccagccctttctcacctcgtgaatcagacagcaggccaggctggccgtggcttgcccctacagcagtcttctatgggcaattatcctcgccacttttagtgatccgttttatgcaaaacgttacattgaccacgagttgttctaattctgatgttcattaatgtaccagtatgggtctcgtaaatagtttgtctttctcttatgttgggggtattaacaaatgttgtgattctttgactatcccttattgtatattgatttcttgcattcagttgtgtttacatttttaagtaaacatttaaaaaaaaaaaaaaaaaaaaaaa

SEQ ID NO: 84 - DNA, 4926 bp, Xenopus laevis
agcagcagcagcagcgtcacaactccaggcgcacgcacttagtgccaagaagaagcgcagaaggtaacagcgctcccaacagcagcagcagcagcctcagcgcagggggaaagggatttctcatccttttttttatttcattcctggtcattgtgtcattgagactactgcacaacggtactggtattggggaaatctattgggatcctgcccaggactctggatgatttaaaggggcttctcgcactcttagcagcttgaaaacgcgacttccagcatggatgccaagggctcccctaccttcccattgtggctccgagctggagtctggatactggcatggagctggatctgccaagctggtgccaatggctgcccggcgttatgtacctgcagtggcaccacagtggattgtcatggtttagcgctaaaaggggtgcccaagaatatccccaggagcacggagaggctggagctgtatgggaacaacattacacggatcagtaagaatgacttctctgggctcaagcaactgagagttttgcaactaatggaaaatcagatcagcaatgttgaacgtggagcttttgacgacatgaaggaactcgagaggctgcgcctgaaccgtaaccagctgcacacattgcctgagcttctcttccagaataaccaggctctctccagactagatctgagtgagaatctaatccaagccattccaaggaaaacatttcgaggagctactgaactcaaaaacctccaaatggataagaaccagatcagctgcattgaagatggagctttccgggccctaagaggactagaggttttaactctgaataacaacaatataaccacaattcctgtttccagtttcaaccatatgcccaagctgaggacattccgtctgcattctaataacttgttttgtgactgccatttggcctggatctcccagtggctacgccagcggccaaccattggactttttacacaatgcactgggccgcctccgcttcgaggcctcaacgtggcagagatccagaagcacgagttcagctgctcaggtcaatctgatccatccacttcccagatctgcagcctctccattgggtcctgtccagcaatgtgcacctgcagtaatggcattatagactgtcgggggaaaggcctcacagcaatacctgcaaatctccccgaaaccatgatggaaatacgcttggagctcaatggtatcaaatctgttccacctggtgccttttcaccctacaaaaagctgcgcagaatagacctgagcaacaaccaaatttcggagatcgcccccgacgctttccagggtcttcgctcgctcaattccctggttttatatggcaacaaaattacagacctccccaaaggtgtgtttagtggtcttcatgccttgcagctgctacttctcaacgccaacaaaataaactgcatccgagccgacactttccaggacttacaaaacctgtcgctcctgtcgctttacgacaacaagattcagagtttggccaaaggcacctttgctgctctccgtgccatccagactctacacttggcgcagaatccttttatctgtgactgcaatttgaagtggctgtcagattttttgagaacaaaccccatcgagacgagtggagctcgttgtgccagtccccggcgactcgccaacaagcgcattgggcagataaaaagcaagaagttcagatgttcagcaaaagaacaatattttattccagggacagaggattatcagctgaatagtgaatgtaacagtgatgttgtgtgtccccccaagtgccggtgtgaatccaatgtggtggactgctcgaacctgaagcttaccaagatcccagagcgtattcctcagtccacagcagagctgcgcttgaataacaatgaaattgctgcccttgaggccactggtcttttcagaaaactcccacacctcaagaaaataaacctgagcaacaacaaaatttcagaaatagaagatgcagcgttcgaaggggcagcatctgtcagcgaattacatctgactgccaatcatttggagtctgtccgtagcggaatgttccggggcctggaagggctgaggacgctaatgcttcggaataaccgggtcagctgtgtccataacgacagcttcaccgggctgaggaatgtccgtctgctctctttatatgataaccagataagcaccatcactccaggagcattcgacactttgcaatcactttctactttgaacttgctggctaacccatttaactgcaactgccaacttgcttggcttggggattggctgaggaagaggaagatagtaactggaaatcctcgctgtcaaaacccagatttcctgagacagatccctctgcaagatgtggccttcccggatttcagatgcgaagaaggtcaggaagaattgagctgtgcaccccaaccacagtgcccccaagaatgcacctgcttggacactgttgtacgctgcagcaacaagcacctcttatccctgcccaagggaatcccaaagaatgtcacagagctttacctggacggaaatcggtttactatggtacccagacagctctccagtttcaaatatctacaactggtggatctaagcaacaacaaaatcagctccctgagtaactcctcctttaccaacatgagccaactcaccacactgattctaagctataattccttgcggtgcatacctcctttggcttttgagggtcttcagtccttaagattgctgtctgtccatgggaatgatatctccagtcttccagaagggatcttttctgatgtcacctctctttcccatctagctattggtgccaaccctctgtattgtgattgtaatttacgatggctgtcaaactgggtgaaaaccggttacaaggagcccggcatcgctcgctgtacaggacctctggaaatggatggaaaactgcttctcacaactcctgctaaaaagtttgaatgcaatgggcctccaggcttgaatattctggccaaatgcaacccctgtctatcagatccttgtcaaaaccaaggtacctgtcaagatgacgctgtggagtactacaagtgcatttgtcctattggttttaagggcaaaaactgtgaaatctccctgaacgcgtgttccagtaacccctgcgagaatcggggcctgtgtctttccaaagaagaaggaagtggatttatttgcacgtgtgcggatggatttgagggcccaacatgctctgtaaataaagatgactgcaaatacagtgactgtgaaaatggtggcacatgtttggatggaataaataactacacctgcttgtgcccatcacaatacacaggttattattgcgagcaccttgtggatatttgctcatcagaattgaatccttgccatcatgacttcaaatgcgttgtgacacccgagggcccaaagtgtgagtgtgccccgggctatggaggagacgactgcagcctaaattatgatgactgcaaagaccaccgttgccagaataatgccctgtgtgtggatgaggtcaatggttattcctgcctctgcactgagggttacagcgggcagctttgtgagatgccatcccaggctccctctccttgtaaattaacgacgtgccagaatggggccaactgtattgaggtggggaacagtgccatgtgtcagtgtctcccaggctttggaggatcaaaatgtgagaaactgctgagcgtaaactttgtggatagagacacttatttgcaatttaccgacctgcagaattggccccgggcaaacatcacacttcaggtgtcaacagcggaagacaatggaattctattgtacaacggagaccatgaccatatggccgtagagttgtaccaaggccacgtcagggttagttatgaccccggaagctttcccagctctgccatttacagtgcagagaccatcaacgacgggcagtttcataccgtggagttggttacctttgaccagatggttaatctgtccattgacggaggggcgcccatgacaatggataagtttgggaagcattataccctcaacggtgacgcacctctatacgtgggaggtatgccagtcgatgtcaactctgcagcttttagactttggcaaatccttaacggaaccagttttcacggctgcatacggaacctgtatatcaataatgagctgcaagattttaccaaaactcagatgaagcctggagttgtgccaggctgtgaaccgtgccggaaactcttttgtcttcatggaatatgccagcctaatgcagcaaatggacccgtgtgccactgtgagaccggatgggctgggccacaatgtgaccaaccactaaatgatccatgtcaaggccacaagtgtgtccacggagcttgcatgccacttgatgctctaacgtacagctgcctgtgccaggatgggtacaaaggtgccctgtgcaaccaacaaggagatctctacaatccgtgtaaaactttgcaatgccagcacgggcgctgtcagatctcagacctgggcgaagcctattgcgagtgtgacagcggctacgtgggagacaattgtgatcaagaatcggaatgccgaggggagccggtgcgggattactaccaagtacagcgaggctacgccatttgccaaaccacacgcactgtgtcctgggttgaatgccgcggttcgtgccacaatcagagctgctgcaccggattacgcatgaaacgccggaagtacacgttcgagtgcagcgacggctcctcctttgtggaagacgtggagaaacccatcaagtgcgggtgcacccagtgcgtgtgagacaagttgaattggattgtatacaagatcacaccggacaaaataaaaaaaaaaaaaaa

SEQ ID NO: 85 - DNA, 3200 bp, Xenopus laevis
ccacgcgtccgacggagcagttattgttcactaaagaaagaggcggaggagtagaaggaagtggatattcccagcttgtgaggaggagacaggcgggcagccacccatcgtttctcctcttatcaagtaacacggtcgctgcctgtaggaagacaaggggctgctcagtgagtcccctcagtgccgggctggggttccaaggaggcggaaggatacggcaacatcggctacgggacccagtcactttataaaataatgagaagtgttctgcatctcttgagaaggtgctgattggtgtataaagaacagacaagctcatgttttcccctgatcaagagaatcaccctgcgaaagcaccagtgaagtatggggaactcattgtattgggatacaatggagctctgccaaatggagacagaggaaggagaaaaagcaggtttgcattacttaaaagactaaaagccaatggggtgaagccaagtactgttcatattgcctgcacgccacaggctgcaaaggcaataagtaacaaggaccagcacagcatttcctacactttgtcccgggcacagactgtggtggtggagtacactcatgatagcaacaccgatatgttccagattggtcgctcaacagagagccctattgattttgtggtaaccgatacagtttcgggaactcagaccaactctgattcacagtctgttcaaagcaccatctccagatttgcctgcaggatcatttgtgaaaggaaccctccatttactgcaaagatatatgctgcgggattcgactcctccaaaaatatttttctaggggagaaagcagccaagtggaagacattagatggacagatggatgggttaacgacaaatggagttcttgttatgcatccacgcaacggattcacagaagattccaagcctggggtgtggagagagatctctgtgtgtgggaatgtgttcagcttgcgagaaacccggtcggcccaacagagagggaaaatggttgaaaacgaaagcaatgaacttcaagatggttccctcatagacctttgtggagcgacgttgctgtggcgcactgctgaggggctcgcccgcaccccaactgtgaaacatttagaagccctgagacaagaaatcaatgcagcaaggcctcaatgtcctgtcggatttaacacactggcgtttcccagcatgaaaagaaaggatgtggtggacgacaaacaaccttgggtttatctgaattgcggtcacgtgcatggctaccacaactgggggaataaagaggaaagagacgggaaagaccgggagtgtcccatgtgtcgttctgtgggtccgtatgtcccgctgtggctgggatgtgaagctgcattttatgtggatgccggccctcctactcatgcttttagcccatgtggacatgtgtgctccgaaaaaacaacttcctattggtcccagatcccgctaccccacggcacacacaccttccatgcagcgtgtccattttgtgcgcaccagttagcgggggagcaaggctacatcagacttattttccaaggacctctcgattagagatcaatttgggactatatgtaaccgataagctaaagattggtttgcttcccagaccacttttccaagtgaagtttgtatcccaataagtgaatgactgcttcataggctaaatcccaggaaaagcagattgcgttcaggaaaagatggggttgaaattttttcggggggactggagcaaaacttgaaaatgggattatgcagatctgatttcaatgccttcataatatttctgaatgaaccgcgtgttcaaaactggggagtaaaactatcagctcaaactacattagtttacacacattgtataatatagcatataaatatatataaatatcacatttttatatttgaccttcttacaggacatgtctgatggtttgatagagcagtggaattccatgattgtgtgtagaagctgagatgccacataaatgtgttttttttctaatttagggtaatcaacaagaaaatgaatgaaattgaggcacatcaagaatttcagtgcattgagttactcttaatgtttatttactgttcattcaaaggagttttttttctcaaaccatcaattttcaaaggcctttaggtatgttgcaacatttcagggttttatttatctggcggtctttcagacctttaatgtatacttttcctgaaattgtttcccctcttgtgtgtgtctattgttaaaacatgacacatgtaacaggtgaggtttaaagcttttgtacggcatggacttccagagcggcattacttgtttttttgtttctttttatacagtgggataaaataacttaatatacatattccaaaggcaactgcctcttagtatgtatctagaagtggtagcatagcatttgtgttaatacaaatttgcccttggttgacaggtgagtaacctttaaatgagagcagtttgtgtgtttttgttttttttttaaatcttgttttctaccagaagaattgtattgtggttttgccacactctcaggaaaccttcagatgtgttcaattgctcttttagggcagagacttcaccaggaaacttcgggcgactttggaaaacaaatcgcgcgatttacattctagccggcgggaaggcagtttggggagattagtcgcccgaaaaagaggagatttgtagactaatctcccctaatctgaccgtgtgtctctgcccttacatagggagcaaaatgtaaagatttgtatagattaaggctgctgggagttgtagtacaacaggtaggaggccacacttttcccaccagtggtcagtatgtttgtgtttagtatttgaataattagcagaaagttacttttgataggaaagtggttttaagccgttttgtacccctcaaaagctgctgctgacatgtaaataccccatttgttaaatacaattcttatttagagtccacatgtttgaatgtagtttatttgatttacagcattatttattcagaccccccctcaagaattgtgtttgtgagagggtggggagtttggttcataccttgtttcatggccggggctgggcgcaacagaagcctgttcaagagacttgtctactatgcatttacttactgcataaaagattgtgattgaaaaaaaaaaaaaaaa

SEQ ID NO: 86 - DNA, 3620 bp, Xenopus laevis
agatgtcaggcactggagaagccacatggagaagtcctggaaaggatgaggagggcatggaagagtcgagcagtgagaatgaagacgacgaggacgatatcatggaggaagaggagggtgatgagaaggaccaagggtccaggcgggtctatctgcccggtatggagcctcttaaggagggggaagagctggtgatggaccaggaggcttatgttctgtatcaccaggcacaaacaggtgccccatgtttaagctttgatgtcatccatgataccctaggggaaaatcgcacagactacccactgactatgttcctctgcgctggtactcaggcggactctgctcaagccaacagaatggtggtaatgaaaatgtacaacttgcaccggacaagcaaggaaaagaaagaagattcagattctgaaagtagcgacagtggggaagaagaggatgaggaagaaaagaagccacagttagaacttgctatggtgcctcattatggcggcattaatcgaattcgtgtaactacaatgggggatgtacccgtggctgctgtctggtcagagaaagggcaggtggagatttatgatctaagaaagcagctggcagcagcgtcggactctcaggtgctcgcttcttttctgaaggaggaacaagcccaaatcaagccagtgttttcgttctccgggcacatgactgaaggttttgcaatggattggtctcaaaaagtagcagggagtttggttactggtgactgcaataagaatatccatctgtggaatccaagggaaggaggaacgtggcacgttgaccagagaccgttcacaggccatactaaatctgtagaggatcttcagtggtctcctactgaagccacggtatttgcctcctgttcagttgatgcttcgattcgtatttgggacacccgagcagcccctaataaagcctgcatgctgactgccagccaagcccatgagagcgatgtaaatgtgatcagctggaatcaccaggaacctttcattgttagcggaggagatgatggtgtcttaaagatctgggaccttcgccagttccagaaaggcgtgagcgtggctaagttcaaacagcacaaggccccaatcacgtcagtagagtggcacccgacggacagcggcgtgtttgcagcgtcgggggccgatgaccaaatcacacagtgggatctggcagttgaaagagatcaggatcaggaagaagaaacagaagacccagcattggcaggcatccctccacagctgctgtttgtccatcaaggagaaaaagatattaaagaacttcactggcatccccagtgcccaggaatagtgataagcacggctctgtctggctttaatgttttccgtaccatcagtgtgtgagttctgctgtgctgtccacttgctgcacagaaaccttcagttgattcatgttttctaacaagggtgctgttgggttatttatgctgccatcatttaaaagactggaggctgagtgtgagttttatgcccggagcattaacacagcagtagttcaaaataaatgatatcactgtggcttacaggtatttgagcagaaatcacccagaaaatattgcaagctgttgtctttcctcatcagcaatgtttattataaagcttgtgtaactgcttcccaacatgctattgcaagtctttcctagtccccaagtcaagagtctgcgtcaggtatttttgccgttaacttttagtatgatgaagggcagttggtttttatctgtggtttttgagttgtttggctttttattcagcagctctccagtctgcaaatttcaacaatctggctgctagggtcgaaataaccctagtaaccattagggatgcaccgaaatccactatgttcgcgaaagattcgggcaaataccaaagagtcctaatttgcatatgcagattcgattcggcctgacagaaggattcggcagaatcctggccgaatcccgaactggattcggtgcgtccctaataaccatgcacttgtatgaataagagactggaatatgaataggagaggcctgaatagaaagatgagcaataaaaagtagcaataacaataaacgcgtacccttacagagcattttgtttttagatggggtcagtgacccctatttgaaagcgggcagagtcaggaggagaagaaggcctgaatacaaaagtcatttaaaaaataacaataaaacagtagactcaaagagcaatagttgttttagctgatgggtcagtgacactgccgcttaaaagctggaaaaagccagaagaggtaggcaaaaggagattttgtgtactccctgttaaatctctttatcttcagtcgcttgggggacagtggggtatagctggcacctctacgaggcaggacacaataaaaaaaatagaaacttgacccctcctgctatacccctcctctgtaggcagagacactcagtttcgttgtgtcctcaggaggttaggaccgtctcctgcattcaggagtattttactatttattttgctcttctttttatttcattacaattccttcacattatatggagctggaccgctacactgagtagtctgatccattacttgaggatgtcaccggggtctcttgtgctctgcactgaccatccagcattgattccctccctctgacatacagagagaggatgcgctggccgggacacagggctgaggtatagccaggttcatcctgtggctcattcctccttatatgcctccagcatccctactctgggaactcctgctgtggctcagcagtataggacaggcatggactgggagtcaaaataggccctgccattccaagtacatagaggcccaaacagccccctaccagcccactatatggtaactttctatggaaccacacagcatcccctctggcatttgccagaacccacagattgccagtccgggcctggtataggatactttgttagttcagacccaggcagtatgttaatcagcctccaccaaacacacaggcaatgggaatggcaattatgtttcctactgtcctcaccgtcagcagcgcaagagagttattgtgggcttagcaccggttgcgcaagcgacttcaccggggctttctttcactctacctggagaggcaacggctgggccagattttgcacttactgtacacgcacctggtgcgcaacctggaagtgcgagctggtgccttaggcgccatttttctaaggcgcacgtcggcaccatacgtcactgctaggggaggagccattctttgtgctctccattgcgtgcccaggcagctacttcccattgattctggaggaggttcctcttccagcgacgcttcagtctccattactagcagactcaccacgctgggcagagatcttcccaagcttctctagagtgcagcccccccccattttttcttagaacacaacagggcagtacttttgacacagtggggtttttagctattgccgccctgtgtcccccaagcagacctggagaaattaattttaaagtgaactacagctttaaagggagtagtttgccttttaaataaacctgtttttttgcaaaaaaaaaaaaaaa

SEQ ID NO: 87 - DNA, 1384 bp, Xenopus laevis
gtgagccgggcccgagtgagctgcgtcatggcctctaacacaacggacatcgtcaggcagggatacgtgaggatgaagagcaggaaactggggatttatcgccgttgctggctggtattgaggaaatcttctagcaaaggtccgtggcggcttgaaaaataccctgatgaaaggtctgtgcttctgaaagcttccccaaaggtaactgagatcagtaatgtgaagtgcatcatgcgactcccaaaggagaccaagaggcaagcagttgccataatattttgtgatgacttggctcgtacattcacatgtgactcagagctggaagcagaagagtggtataaggttctgtctatggaatgcccaggagctagagtgaccgattacaacctaggggagcctgatttactgacgccaggtgtacagagtgaacagacagagcgatttagtgtctttttattgccctcctcaaacctggatgtgtatggagaatgcaagatgcaaattacccaggaaaatctctacctctgggacccacacaaccctcgcaccaaactgctgtcctggcctctctgtgctctgcggcgatatggaagtgattcctcacggtttacttttgaggcagaacgggtgtgtggaatcagtgagggcctgtacacattccagactctggaaggacagcagatctatgagcgagtgcacaagtctgtccaggcgttggctgatcagcacaagaatcttctccttgagatggaaaaaaactcccgtcgtcaaaacaaggatgcagagaacatcagctacccatctcccaccacatccatgctgccccgtagcgcatactggcaccatattaccagtggccagaacaatgcagagtcttccagcaacatccgtgtaccaagtggcagagaatcagatcccatcaccagacggatgtgtgatcggaagacttcagcatgtgaaaggaagctccccacttcagcctctcagtgacagtcttgtctttacccagcctaatccaaacctaaagggcactgaaggcttagtgaacaaaaaggtattatgtgacgctgtacctgtactactaaggaattggcctacattcccttattggcttcttaggaagtaggagcctgaaagacattctgtgtgtctggtctttcttagaaagaagtcactaatggaaattgctctgaggttttctaccaaggaaggactgcagtatgtgtatgtctgcacaatagaaacaagtgctctgaaatgaccccatgtagcaccaccacttcctgaccagatgataaggagagcatgtaagacaggaaagtgcaggggatggaagtataatttctgtaaaaaagctaattttgcacttaaaaaaaaaaaaaaa

SEQ ID NO: 88 - DNA, 2649 bp, Xenopus laevis
gaattccggttcttgggtagtggggactaattgggtgattgcccagaggagctgtgaggctttttctctcccccttctatctacgtgtctctatctgcaatggaccaggattatgagagacggcttctacggcagatcaacctccagaatgagaacaccataccttgtgcatcagaaatgaggaggacattaacaccaacaaactctcccatgtcttcaccaagtaaacatggagacaggtttataccatcgcgggcaggagcgaattggagcattaacttccacagaataaatgagaatgaaaaatcccccagtcagaacagaaaagccaaggatgccacggcagacagtggcaaagatggcctagcttattcagctctgcttaagaatgagctgttgggagctggtattgagaaagttcaagatccacagactgaagatagacgactacaaccatcaacgccagaaaaaaagagcctgtttacgtactctctaagttctaagcgtgcaagcccagatgatggaaatgaagtgtctccttattctttgtcacctgtcagtaataaaagccagaagctattgcggtctccacgaaagcctacaaggaagatttcgaagatcccctttaaagttctggatgcacctgagttacaagatgacttttacctcaacctagtggattggtcatccctcaatgttttaagtgtgggcttgggaacttgtgtgtacttatggagtgcatgtactagccaggtgactagactatgtgacctctctgtggaaggggattctgtaacttcagttggttggtcagagcggggaaacctggtagctgtggggacacacaaaggctttgttcagatttgggatgcatcagcagggaagaaactgtccactctggagggacacacagcccgtgtgggagccttggcttggaatgcagaccagctttcctctgggagtagggacaggatgatcttacaaagggatattcgcacaccacctgttcagtcagagagaaggctgcaaggccacaggcaagaagtgtgtggcctcaagtggtccacagaccaccagctcctggcttcaggagggaatgacaacaagctcttggtttggaaccattctagcctgagtcctgttcaacagtatactgaacatctagctgcagtgaaggcaattgcctggtcccctcatcaacatggccttttggcttcaggcgggggcactgctgaccgctgcatccgcttctggaacacactgacaggccagcctttacagtgtattgatactggctctcaagtctgtaacttggcctggtctaagcatgcaaatgaactggtaagcacacatggctactctcaaaatcagatattagtatggaaatatccatcgcttactcaggtggccaagttgactggacattcctaccgtgttctctacctggctatgtcaccagatggggaggccattgttacaggagcaggtgatgaaacgctgagattctggaatgtttttagcaaaacacgctccacaaaggagtctgtctcggttctaaacctgttcacgagaatacgatagattactcagctgtgagacctgtcctcctaaacatatccatgcatcattggacattaacaaagactggacttctatggagcctagggtctccagtcaactgaggattttttgcacaatacattgtagtgacggatgttaattaaatagcaaaacattttcagtatatatgttatgttgaacagggtttgaaaggggaccacaaatagcctgctgctgacaatggtagataaatgtgttaatgtaaatgctgatgtatttgttagtgctgtgggattaacacaaccctctccaaatgagaaaagaatagaaaaaccactgtgaacgcagcaaaccctgccacaaagataaagctgtggtttataccagtgcagagtattttacatactgatcttacatactgaactttttttttttttttgcatgcagcaaatttctgtgccattttcttgaactgttgctgcccagtatatctttctgcagcttaatatctttcgttccaaataaatcaccagccatctccgcaagggttgtcatggggtcggggcttattttttaaaatggttgcttttttgtgtccattgcttgttgattctgttgcagttattttaatggatgatgaccagtgttttaacgaagatgttatggaataatgactgtcttatttgttccccaccatgtgttaaaaatgtaggaaccacccaaatacaggtaccatttgaacaaattgatgtgggaacaaaaagaaatacaagaaaagcacttagtttttggttagtgaaactcacttatctattggtttttctttggggcagtatcattcattccaccagtgccaagaggtagagtacctaacctctttattctttgttttataagcaaaagtataatccaaatgatagtttaaaaatgtatttattttgtgaaagtgtgtgccatttaattatgtatgattgtaatctgttacatccagactatgggaatattgttttctctgtcagcattatatgtcaaaatcttgtgtgactcttaaatatctatcacttctgatgccaaaaaaaaaaaacggaa

SEQ ID NO: 89 - DNA, 1255 bp, Xenopus laevis
tgtttgaggaaggcaaagaaacagagagaccgggccctggggccagtggaggaggtgaggggcctacaagagcatcatgtctgagacatacgacttcctgttcaagttccttgtcattggcagtgctgggacagggaagtcctgccttcttcatcagtttattgaaagtaaatttaaacaagattcaaatcatacaatcggagtggaatttggatctagaattgttaatgtcggtggtaaatctgttaagctgcagatctgggatacggcaggacaggagagattcagatcggtaactcgcagttactacagaggagcagctggggcactgctagtttatgacattgcaagccgagaaacctataatgctcttaccaactggttgacagatgccaggactctggccagtccaaacattattattatcttgtgtggaaacaaaaaagatttggatgctgatcgagaggtgacattccttgaggcatcccgcttcgctcaggagaatgaactgatgtttttggaaactagtgcgctgactggagaaaatgtggaagaagcttttttaaaatgtgcaaggacgatactgagtaaaatagaatcaggagagcttgacccagagaggatgtggtctgggatccagtatggtgatgcctcaccacgacatgcaaagcactctcatggcacccaacagcagagcaggcaacagtgcaattgctaatacaaccactctaaaggagtttatcagtttagacgtagaagcttgccctggaagcttgctcatccttttccaagtaaatgaaagcacttgccctaactacaggattcatcttgttccctgctctgtgtttggaagcccgtgtgatggcatccttcctgatatggctccttacgcactaaaaacattggagagaagaatcacatctttgtcagtcactgtggccactctgtgaatatcctccaagtggatgaaaagccaaataattcatcctagtgtcagcccccattccatcccaagaaggaactgtggttattataataaacatatatatatatatataagcaccaaaaaattaaatgttatatattacagtaatcaggatcaaaggaacacaataatcagtgcactcattatgcatgaagaacgactgatatttgtgctccttattcacccagtatcagagctgacatttagtacatatcatttttggtcagcttgttttgttcatatacccggtttattaaaaaaaaaaaaaaa

SEQ ID NO: 90 - DNA, 3788 bp, Xenopus laevis
ccaccaggctgaagacctggattatctgatctgtactgaaagtgtgccgttactgtttgggaaaaatatcattttacagtgaaaagtgacagcgttgtggagtttaatcctgccagaatctcaagcctgcaacttgaaacttgcatgccatggaacacacactatttggctgcctgcgcagcccccatgccacctctcagggcttacacccctttgcccagtcttctcttgcccttcatggaagatccgaccatatgtcctaccctgatttatcctcttcatcgtcctcttgcatattaactggctatcccaatgaggagagcatgttcgggagtcagcatcacagagggcatcatcatcaccatcatcatcatcaccagcatcaacagcaccagaccttgcaatcaaattggcacattcctcagatgtcatctcctcctgcctctaccagacatagcctttgccttcagcaggaatctggacctccagatctaagtggaagcccctctattttgtgttcaaatacatctagcctgggcactaacaactcaacgggtgcaacatgtgtgacaggggactatggcagacagaccctatcccctgcagaagcagaaaagaggactggtaaaagaaaaagtgacagctcagattcccaggaaggaagctacaagtcagatgtgaacagtaaaccaaggaaggaaagaacagcatttacaaaagaacaaatcagagagctagaagctgaatttgctcaccacaactacctgacaagattgagaagatatgaaatagcagtgaacttggatcttacagaaagacaggtcaaagtttggttccaaaaccgaagaatgaaatggaagcgagtaaaagggggccaacaaggtgctgccgctagagaaaaggaactggtgaatgtaaaaaaaggaactcttctaccttctgagctttctgggatcagatcaagtagtcttcagcatacagctgactcattaaccaatgatgatagccgtgatagtgatcaaagctctgaacatgcacatttgtgattccaaaaaaacaaaagactttcaagcagttttgttctcaggaagaaattgctacatggcaagacttattcaagcaatgtctatgtacacagatattctgctgaactaatctgtttgtaatttttttttgaagagtttacttaaataccacactaatgtcttaaatacatgattatgaagaaggaaaactggtttggaacattccaacacttaaatgattacaaagctgatgactatgggcaggtatacttgctttagcctgcactgatgtttactcagaaaacagtttacttaatacaaagatagttttcactttcaaaaaggcagtgataaaaatctgctattttataagcaaaacgaaaacaaactaaataaatataaatttttagctctgtaaatattcatatcgcagtatcactatgttcactacttttgcaatgcattcatgtatgaagtaagcattgaacaaaaaaagacatttcaatacgacttgtatccttctctctttaacgctcttcagtcctgcacatgagttcaacttggaaatatttatattattaaactggcttcctcaaggagatgtagttttctattgtgatgtcaggaatatccatacttatctgccacttatctggcctaactgtatttctaacatctgctaaatgaatgttactgagactagaatatcttactttgttactgcaaacaaagacaaaatcaaatttacagttcaacagaatggtgaacagttgccacagataatgcagctcccttggaacccttttgtgtaatgctgtgtaacattgaaagtacttttccattattcagaccaagacgagaccagaccaagaaaaaaaaaaatagttgttaaaattagagacaagaagaatattatattttatgcatggccatccacttgttctaactttaaaggcaaatgctcaggggaatatttttgaaagtcagtggcataaataacaccacccacgggacagcaccgcaaaagccaccagatcccccgtcaccgtatctgccagggtttaaacagagctttcgcaccttcccgttctggctggaataaatcaaagatggtcatgcttgccacctgtcgaacgtacagccatctttgatttttttccattgaagtttcagcaaggtggaagaggcagagagagagataagcacagttagaagaaaagtgtggtattcagcttggtgagaaaatgctttcaagctatcaatgcagtgccgagtggccatttctgcagtcattttactgtcaagtctggagttaatggagaccattgaacatatttgcagtgatcttaatggcaagtctgggattttttgcaaggtatacatgtgcttcattagttctccaagggggagggaccccccatgtttgtctgcagtgggggccctcaaactctagttacgccactgatgaaagtattgaagtacagtcactttaaagtcatgtacaccatgtagaatattgtgtaattattgaaatacaatacatagcaatattgtggtgtaaaaggagttattaatttggaaagaaacgggtaaaaccatcttgactgccacaactttttgcatagcattttataccattttttcaggccagaattcatcattgcctgaattttctgtcttgtagtctgactagtgtgatttatggtgtacactttggttttagtcgggcattaaataaaatacaatgattattccttttgtagtggattatctccaaaattgtggtgcatggtgttgattcaccagtaagcactataaaagagattgtcgtgtatttttcactgaatttactcctttttgggtgtagaatatttcacaaggctttctaaatgtgcccatttagcaagcagaagccacaaagacattagcgcaaagcaaatgactgggaaaagagatcagagtgttcagtacaagttaaaccagcaaattcttgacaattattgagcactagcacaaaaagacatttgctcaaggcactgttattatactttgtcactcgtttactgaatttacagtgcagccaatagtaaaaatcagtctattccacatcctggactcccacccacattcacgcaaacagaatctgcagcagctgtggccagacaggttagatgactgtaggtttgggaggagggggaaactaaactgggactatatgtcagactggggactgcctgaggaaacaaaacagggatcagccaggggagacagacaaggcataaatgggctggataaattagcaggtgatcagtgtaacagattgggggtccagctgaggaaacaaacaggaaatcaggaagaggagacagacagctatcattggattggggaaattagcaggtgatttgtgtgaaagatggggcaattcagctgaggaaacaaacgggatcaggacggagagacaggcaggatatgactgaacatggattctaaagatctacgaatacataatatttcatgcaactcattcacaagcaaaaccagcagagccttgaggtccctcttagtctaggtagttgaaaagtacccaaactactcactttgtttgcataaaggtggatacaaaacaattaaggttgcactgattaatgtgtactgattaaaagaacaaagccaaaataaaagctagcaatgcattgtctttactttgtaaaaaatgttcaataaaattctctttaactaccaaaaaaaaaaaaaaaaaaa

SEQ ID NO: 91 - DNA, 3124 bp, Xenopus laevis
gagcagccgagcaggatggctccactttggtttctcctgcttgtggtctccactgttggggcgacactgtgcccggatggcagcgcctgtggggagaagagtctgtgctgtcggctgcctggcaacgagggcttcggctgttgtcccgagggagaggttgtgtctcactcccttcccatgatgctctcccagacctcctgctttgggccctcgggttgcccagatgaatattcctgtgtgactactcctcaggggggaagcgcttgctgtccgatggctcagggaaggtcgtgccgagatggacatcactgctgctccgctggctcttattgctcagacgacggtcacttctgtatcccagcctctaatgagtcggccgtaatctgcccagatgggaagtctgaatgtcccgctctcaccacctgctgcctcatgtctgacatgtcatcgtgggggtgctgccctatgccacaggctgtctgttgtgctgatcacatgcactgctgtccttccaactccaagtgtgacgtccaacaaggccgatgtgtcaccaaacaggaccatgttccctggatgcagaaacttccagcccgtgtgaggttggtggtgggtttgggagatgaagaacgttgggttcaatgtcctgatggcacttcttgcccagacggctccacctgctgtgaacaagtcgaccgcacatacggctgctgctccatcttgtctgccgtctgttgttctgatcatcttcactgctgccctgctggaacctcgtgtgaccttgtccatcagaaatgcgtttcctcaaatggggagggaccgttgttgctgcagatgccggctgtcaggcaggaatcagccaatcaggttctctgtgatgcctccactagttgcccagataagaacacctgctgccgcctgttatcggggaagtttggttgttgcccctatgatcaggcagtttgttgtgaggatcagattcactgctgtcccaatggcttcacgtgttctgacggcagctgtgtgatggccgagcactcgatcccctggatgaagaagactttggctaaggggctgacgacaaccagagttcgttgtgatgaaactgccagttgcccagaacaggaaacctgctgtcgtctggtatctgggaagtgggggtgctgtcctatagagaaggccgtgtgttgtgacgatcatctccactgctgccctgaaggctttacctgcacccagggccagtgcttggcagaggagctctccatcccctggttcagcaaaactccagctctgacccataaggccagagacgtccagtgtgacgacatgtacagctgcccagatggacaaacctgctgccgcctggcgtccggggactgggggtgctgccctatagcaaaggccgtgtgttgtgaggatcatgaacactgctgccccccgggatacacctgctccggaggagactgtcagatgggggatcagtccatcccgtggctccgcaagactccggctctgagacaggaggccagagacgtccagtgtgacgacatgtacagctgcccagatggacaaacctgctgccgcctggcgtccggggactgggggtgctgccctatagcaaaggccgtgtgttgtgaggatcatgaacactgctgccccccgggatacacctgctccggaggagactgtcagatgggggatcagtccatcccgtggctccgcaagactccggctctgagacaggaggccagagacgtccagtgtgacgacatgtacagctgcccagatggacaaacctgctgccgcctggcgtccggggactgggggtgctgccctatagcaaaggccgtgtgttgtgaggatcatgaacactgctgccccccgggatacacctgctccggaggagactgtcagatgggggatcagtccatcccgtggctccgcaagactccggctctgagacaggaggccagagacgtccagtgtgacgacatgtacagctgcccagatggacaaacctgctgccgcctggcgtccggggactgggggtgctgccctatagcaaaggccgtgtgttgtgaggatcatgaacactgctgccccccgggatacacctgctccggaggagactgtcagatgggggatcagtccatcccgtggctccgcaagactccggctctgagacaggaggccagagacgtccagtgtgacgacatgtacagctgcccagatggacaaacctgctgccgcctggcgtccggggactgggggtgctgccctatagcaaaggccgtgtgttgtgacgaccatgaacactgctgcccccctggattcacctgctctggagcccaatgtatcggcagtggcggggggctctccatcccctggttcagcaggactccagctctgagacaggagggtaacgcagtgaaatgcgacgactccttctcctgcggcgacgggcaaagctgctgccgcatggtgtctggggagtggggctgctgccctatagagaaggcagtttgttgctcagaccatctgcattgttgtcccgccggttacacttgtaacgtggccgctggcagttgtgagattccccagaagaaagttgtgaagatttcctttcctggcgccacatcggctctgaggctgaactacgtctggtgcgacgcacaaacttactgttttgatggtcagacatgttgccgaggacgtggaggcgtgtggaactgttgtctttacactcagggggtgtgttgcccagacatggtgcactgctgtccctatggttatgtctgtctggcaggtggagcttcgtgcgctcgctcaggaatgtcacgttgggatgggaaaccctctcctcccctatgaactgacacaacttgcacttgattgttgctactaatgttgtaacactggaatcttttttgtttgttatatttccaacaagattttttgttaccccctttgcttggggagggggtgtttgaatttccctccagttaaacaagagattcccctggagcaggacttgagcagtggtgtatttggctccagctggaggacttcattgtgccttttctttttaataaaacaagttgtgcctctggaaaaaaaaaaaaaaaaa

SEQ ID NO: 92 - DNA, 3117 bp, Xenopus laevis
cctgctcccattgagacatggcatctcccgcacccccgccgaccctcgcggtgcatctcacagacaatgtcaggttgttgaagttaaaggaaatgttcatctctaaatatggctctgtgccctcattttatgcccgagcaccaggacgagtcaacttaataggtgagcatattgattattgtggctatgccgttctccccatggctattgagcaagacatattagcagctgtgcagatcagtaatgatcaaaccgttgagctctccaatacaaacctatcctatggggacttctctgtaaatgttaatgatatcaagattgataaaactaagcctttatggcacaactactttctgtgcggactcaaaggaattcaggaccatttcagtttgagcagccctactggaatgaaatgtttggtagatggaacaattcctgcaagttcgggtctttccagttccagtgccttagtctgctgtgctgggcttgttaccctaattgctaataagatgtctctttcaaaggttgaacttgctgagacatgtgcaaaatgcgagcaatatattggcactgaaggtggtggcatggaccaatccatttcattcctcgcagaagaaggaactgctaagctaattgaatttagccccctgagatcaactgatgtaaagcttccagctggggcagtttttgtcattgctaacagttgtgttgaaatgaataaagcagcaacatcacattttaatataagggtaatggagtgtcgcctagctactaagattattgcaaaggcaagagggctagactggaaaaacttgatgaaattaggagatctgcaagccaaacttggggtcaactttgaggatattatggctatagtggaggaaattcttcaccccgagccatacacaagagaggaaatttgtgattgtttgggtataagtttagaagaactccttgagaaaatacttagccaaaatacacaagatgtttccaccttcaaattgtatcagcgagctaaacatgtgtacagtgaagctgccagagtccttgcctttaagaaggtttgtgatgaggcacctgccaatgcagtccagctgctcggggacctcatgaaccggagccacgtgagctgcagagacatgtacgaatgtagctgccctgaactggatcagctggtggacatctgcctgaaatcgggggctgttggttcccgtctgacaggggccggatggggtggctgctccgtctctatggttccagaggacaaactcggtgacttcctttcaaaggtgcaagatgcttattacaaattggaggaccgaatgtttgcgctgctcaaaacaagtctctttgccacaaatcctggatgcggggcaatggttcttatggaagcagattaaatattgctccatggcctaatcaaaatttctctctgctttgtagcatcttaatcatatgttgccaatgaattaaacacatcttttatttcctgggatcattttatggctctagtaggatttgtttgcaaataggacataagtcccattatgtaataaaaggcacaacgtttgcccaggtgcagtaacccatagcatccaataaaatgtttgcttttaaacatgtgacaaggaaatgctaactgcagattggttataggaattgtagcaaactttgcacctgttgttacataaccccctaaatgtggtggatcattcaagagaatgagggtatggattaaggagtatatgttacattatggggcacatttagtaaaattcaaatgaatatcatatttttatgaaaacaaatccaaccaaactcccttccagaaaaatgccaaaatcgatttatttttttctgcgttttctctgcaaaaactcaacttttttggattatcgaattttgtttgattatccagcgcagatcacaatgtcaaaaaaacaacttcagagactgctattgacttctacatgacctcgacaggtttttcggacttggatttttagcagttttgtggtatgataaatctccaaaaattccatttttttttccacaaaaaaattgagttttcaccctaaaaaaccatgaccagaaacaaaatcgaggtttaataaatgggcccctatgagtgttcattctgccaatcagaggggttatgagcaatttttgtgcagtgcaatttcaatgtttttacacacaatgcagcattttgactataactccagtgtaatagcagtcacaaagtgtcgatacccctaacactactgtggccgatgtgctaaaatgtacacaattgcacttgtgcttcaacgtcaattaaatacagttgcactgaaaatactggaaaaaaggtttccaattttgtagcttccagtgctcagtgtcgaaaggaaagtgtacatccagttctttaggcacaaatattatgtgtctatttgctcagacccctggggaaccctggagctattgccactagcgcttctccttattttaatagtagggatgcaccgaatccaggattcggcctttttcagcagtattcggattcggccaaatccttatggaaggccaaaccggatcctaatctgcatttgcaatttaaaggcggggaggaaaatcgcgtgaccttttgacacaaaacaaggaagtaaaaaatgttttcccttcccacccctaatttgcatatgcaaattcagattccgtttggtattcggctgaatctttcgcggaggcatccctagttaatagacaccctgtgtgtggttcaatagagggggcttggcaggacagactgagcagcacttattgcaagaaacggaagtacaaggagtgtcttttgacacaagtacctttaatgaattagtgcaactgattacaaccaagttacacaagggattttgtatgtgaccattattaggctttttttttggcaagaggaccatgtcagaataatgcttattttcctgtctctttccatattcaactgaaagaaattatgtatgtctcctttatatcattttatagaaatgtgtgtgtgaaggtttgctacaggaatgatggctctactgtgattttcaattaaacttttggataatgcaaatgaaaaaaaaaaaaaaa

SEQ ID NO: 93 - DNA, 3408 bp, Xenopus laevis
gcgggagctgagacgaaacgagctgtgacagcgggtgaagggtgattgcgaggtggggggtggggaagtgaagacagcgagtcaggagagcctaggagtgggccccatacagcaagcaatactatccaaggcttatatttttctggacacactaccttcctcaccatgggaaacgctgccaccgccaagaaggggaatgaaattgagagcgtgaaagaatttctagccaaagccaaagaagactttttaagaaagtgggaaacgcctcctcagaatactgcaagtctagatgattttgatagaatgaaaacccttggaactggctcatttggaagagttatgttagtgaaacataaaggtgcagagcagtattatgctatgaagatactggataaacagaaggtggtgaagctgaaacaaatagagcatacattaaatgaaaagaggatattgcaggcagtgaactttcctttccttgtcaggttggaatattcctttaaggataactctaatttatatatgattatggaatatgtccctgggggagaaatgttttcacatttaagaaggattggcaggttcagtgagcctcacgcaagattttacgcagctcagatagtgctgacatttgagtacctccattcactagaccttatctacagagatctcaaaccagaaaatcttttaattgaccagcaaggatacattcaggtcacagattttgggtttgccaaaagagtaaagggcagaacttggacattatgtggaacgccagagtatctggcaccagaaattattttaagcaagggttataacaaagcagttgactggtgggcattaggagttttaatatatgaaatggctgctggttatccccctttctttgctgatcaacccattcagatctatgaaaaaattgtgtcaggaaaggtacggtttccttcccacttcagctcagaccttaaagacctgctaaggaacttgctccaggtagatttgaccaaaagatatggcaacttgaagaatggcgttaatgacatcaaaaatcacaaatggtttgctacaacagactggattgcaatttatcagagaaaggtggaagctcccttcataccaaagtgcagagggcctggagataccagtaactttgatgactatgaagaagaagatattcgtgtgtctctgacagaaaaatgtgcaaaagagtttgccgacttttaggatgtgcatgagaacaagatgacatcagggctcatattggaatctttgcactctatttgcagatggggtggagctgagaccatcttatgtcacaacagttacctagttccttcattccgcaaggctgactaaggtctattttgccatcttccatgtgtgcgtttcgcaccaacccttttatctaggcacaattaatcaagcgatttgtgctgtaacacagaatgctagaccactttccttcgtctcttgttttattttattttttttccttttttgtttacatcttgtatgttttgcccttctcctcacagctatttttttaagtagtattttacccaactacactcccttttattttgaaaatgtattattattagttgggggggcagggggtacgagagagagagagagagagatctgggaggtgctgcaatgaggaaaatttcagatggaggaaatgttgtttctagtctctgccactccataggtttttgttttacattgtaaaccttatttctgtatggtggaaaatgtttcagctcaaattggaactactggccaatattattttgagtgtttatgaagtaaccataaccacggccaaaatctccaaatggaaataatgttgagaacaaaattcttcctagtgattgaccaaaattggttagaaatcaatttgagtgctacgtttggctagatagaccctgtgccttggatttctattctttaactgcgctgcccctcctggtgtgttccttgctttggcaggacctaaatgttgcgtgaccatactgtacgacacatagcacattgtttggttaaacttgaggatttacagctgaagtctttgaattacataatgctgactttaaaaatatcacgtccttcttggggggggttttaataacattaaacctgctcttcaataaagcaagtgttggtcagtatttttttaaatggaacatgataaattaaaagcgattaaatcatgactcctttaccagctccgctgtattttattgctatttactaaacgtatcgaggtcataaaggataacaagataaaaaggggaatgttcctgtctgaagaaaacacaattgaaaagcaagagcagagatcgtcattgcattgctaaggtgattctcactttctgtttgttctaaagaataaaggttcttgccaagttttattctggtatactatattagtaatctgagaatgaagaagtactgttatcatgcctctgtacaacgacggttcattgtcacatgaaaagttgatgatgtaagcaaaaattgtcactgcttgtgttttacgcctttttgtttctccttattgtatagcatttgctttagatgtaactaccaacctttcttagacagaatgtacattcacacttggtatttgggcttagttgccttttttcttttatcaccaactgactcaaaataagtctgccatgtgcttacgaacagcacttttccatacttatttcagtgtctgtagctctgcacatcgttattttatttttattttttgtttctttcaaactttctccactatatttgtacacatctctgtaacaatgtacccttgtcttaaaaccgcacatccgaacagtttcaaaataaactagttgcattttattatccacttacatgcataaaagacaaattgtttttattaaaatatcggtatatagccattgtatttgtttaaatgtcagtgggaataggtcgctggcactacttccttttaatctgtatgacactcctgtaagaaaagactttgtagacatttttcaaccaagtttaagatgtactatccaacattctgtatatctttaggtcctcgagcatttttgcataacagcgtgaataggagactgatgacgattgcagtctttatccatccttatttacttgtgcaagaaaggtataaaatactttgctgtagcaaattttatgtaacaaaaaatatatataaatatatatatatataatatacatcacaataaattaaaaaggattctttgtatgaaaatgttaaaatcttttgtattccatttagactgaggatatgcggtgtatgctagctgtatgcaatcaattctacagtaacattgttgtcgtttatgaacttaaaaagattttaataaatgctggagatcaaaaaaaaaaaaaaaa

SEQ ID NO: 94 - DNA, 3209 bp, Xenopus laevis
cccacgcgtccgatatagtgtgagagttcccagctgttacaggcgcgtcccatatcggtccgactgaatcctcagtttcctgtcaaagaagcagaagaacgctgtagaataaaggataaggatggagctagagaataaattcaagaaggtgacacttggtcatgaggaaggatctggtgctccatgtttaaaatgcaaagaaaaatgtgagggatttgaactgcatttttggaggaaaatatgtagaaactgcaaatgtggccaagaagaacatagcgtcctttctaacaatgaagatgatcggaaagtggggaagctatttgaggatacaaaatatacagctcttatcgcaaagctgaaaactgatggcatacccacctataaacgaaacgtgatgatactcacaagcccagttgcagcaaaaaaggacgtgtccattaataccgtgacctatgaatgggcacctccagtgcaaaaccaggccctggccagacgttatatggaactaattccaaaagacaaacagcctgtcgctggttcagaaggtgctcagtacagaaagaagcagttggctaagcagctgcctgctcatgatcaagatccttccaagtgtcatgaattgtctccaaatgaggtgaagcaaatggagcagtttgtgaagaaatataaaaatgaagtccttggtgtgggagatgtcaaacttcccaaagaagtggaggcacaagctagtggagcaggtagatcaactaatggaagtttgagcacgcttacaactgttaagagcacagacgacaaggtggctgctcagaagggatctacatattattgtttccggtgcaaagagaacatgagagaaggagaccccgctgtatatgctgagcgtgctggatatgacaagttgtggcatccttcttgctttgtctgcttcacttgcaatgaacttctagttgatatgatctatttctggaaaaatggaaagctgtactgtggaaggcattactgtgacagtgaaaagccacgttgtgctggttgtgatgagctgatctttagtaatgaatacactcaagcagaaggtctgaactggcatctcaagcatttctgctgcttcgattgtgacattgtccttgctggagagatctacgtgatggtgaatgataaagcagtctgtaagccatgctatgtgaaaaaccatgctgtgtcatgccaaggctgccataatgccatcgaccctgaggttcagcgtgtgagttataatggcttccactggcatgcagcaccagagtgctttatttgctcatgttgcagcaagtgtctgattggacagaagttcatgcccattgaaggaatggtgttctgctcagtggagtgcaagaaaaaaatgtcttcataatgaacaaatggaaatatccgtttaaatgcttattttcaagtgatgatctgcaagcattttcatgcctatgacattttctacaaattcacaacaaatccataaatagaatattacactgctgtagtgaagaaatatataaagcatttgtatttttcatactgtggcattcagaaattgcatatgtgtgtatataaaggttctgtaaagtggaagatggtaatgtcaaattatggtattgttattattccaggtgtgaacacaaagtgcaacatcacagaacagtataaatatatatatatatatatatatatatatatattttccctggccttcaaagtcacattgggatattatgcaaacaacttacaaatgtaatagtcattaaatcttcttaattgtcccttagtagaatgaaaatatttaaaaatcaaagcataatctattcctgttccactttttgtattgactttgctatttcttctattccttataatcctccttatcactttcaaaagcccttcttgttcagtgtaaagataaaaactaggtaaacagataggctgtgcaaaataaaaaatgtttataatatagttagttagccaaaagtgtaatgtataaaggctggagtgattggatgtgtaacataatagccagaacactacttcctgcatttcagctctcttggtttccactgactggttaacaggcagtaaccaattcagtgtcggactggcccggcgggataccgggaaaaacttataaaatattctttacatacttgttttgtaataaaaagtcacctgatttccctccctgcccctaatttgcatattaaaattcagatttggttcagcccatgctgtttggtttcaaatatagcctgtgacaccataaaccatttatattcttctgtaagtcttacttgtctaagtctactagtttctgtttgctagtacctctaatacctctaagggtaagcttgcttgcaccctaaaactctgcaccactagtatgtagtagcagtcatgaatattatggagaaataacttgtgcaatttaaaattgttaactttattggagttaaccaatcgtgagactgaacatgcaatgaccaagccaacatgttgtgagcgtttacaatttacgcgtgtctttgtatgtgcatagatgtaaactatacatataggtgtgtgtatatataggtatcttttaatttgctgacttttctatgcattaactgtttttctatatatgttaaagaaatcattgggctgttctgcctagttcctttttgatttttagaatgtatttatttgtttatcttgtcttgtccaagaaaccagttaaaaagccatccatagactaaagagacggattcctttttcagctcatttctcacacattagattacaagaattacgattaaaagaaaaaaaagtttaagatttcaaatgacataacagatcagcatacatgtgaatatagaattgagtacagcgaggtagactgttcctttgcttgtgatagtatatatttctatatatatattttgtagtttatttttctttaatagtcaacttagaataaaatattttgaattcctatttcttatacaaccctggctgaaaggaaaaagtctagccaggggttataagataaagctgccagaattgctaaaattcttcagtgcctctctatccttgtcttccaagtcgtatttcaaggctttgttttcactgaccaacaggaatgttcaagcactttaatttgtattacctttcattaaatctatatacatttctaaaaaaaaaaaaaaaaa

SEQ ID NO: 95 - DNA, 3196 bp, Xenopus laevis
gggagctggagccggccgggcgtgaaccgtagtcggaggagagctccaaagttcccggcccgggaggcgtcgtatgaatcgagaggggaggcagcgggagatagtgggtgcgagaagaccgctcttgcccccctctatgtgaggggggttcccggagagtgatatctccggcaatataagatgggtgccactaaaagcaagccacgagaaggcgggccacggagtcgcagtctggatattgcggaagggtcccaccagcctttcacctccctttctgcctctcagacccccagcaagagcctggattcgcaccgaccacctggacagccatttgggggcaactgtgacctgacaccttttggaggggtcaatttctctgatacaatcacttccccccaaaggacaggaccactagcagggggcgtcaccacctttgtcgctttgtacgattatgaatctcgcaccgagactgacctgtccttcaggaagggggaaagactacagattgtcaataacacgagacctgacatgagggaaggcgactggtggttggcacgttccctaagctctgggcagactggctacattccaagtaactacgtagctccttcggactccattcaggctgaagagtggtatttggggaagataacacgccgagaagcagagcgtctgctgctgagccttgaaaaccctcgagggactttcctggtcagagagagcgaaactaccaaaggtgcatactgcttgtctgtctctgactatgatgccagtcgtggcctcaacgtgaagcattacaagatccgtaaattagacagtggaggattttacatcacgtctcgaactcagttcagcagcctgcagcaacttgtggcctactatagcaaacacgcagatggcctatgtcaccgcctgaccgctgtttgtcccactgccaagccccaaactcagggcctgtccaaagatgcctgggaaattccacgtgattctctgcgcttggagctcaagcttggacagggctgctttggagaagtttggatgggcacttggaacggaaccactcgagtggccatcaagactctgaagcctggcaccatgtcacctgaagcatttctgcaggaagcacaggtcatgaagaaacttcggcatgagaagctggtacagctttatgctgtggtgtcagaggaacccatctacatagtaacagagtatatgagcaaaggcagtctactggatttcttgaagggtgaaatggggcgatatctaaggcttccccaacttgtggatatggctgcccagattgcttcaggcatggcctacgtggaacgtatgaattatgtgcatcgggatctgagagcagccaacattttggtgggagagaatttggtgtgcaaggtggctgactttggcttggcacgactgatagaggacaatgagtatacagcccgtcaaggtgccaagttccctattaagtggacagcccctgaggctgctctatatggtagattcaccattaaatctgatgtctggtcttttggaattctcctgaccgagctcaccaccaagggcagggtcccttaccctggcatggttaaccgggaagtgttggaccaagtagagcgaggataccgcatgccttgtcccccggattgcccagaatccctccatgatctgatgttccagtgctggaggaaggatcctgaggagagaccaacctttgaatacctgcaggcgttcctggaggactattttacagcaaccgaaccgcagtaccagcctggggacaacctttaggttttgcctcataatcaagagacagttgtaggactcttaggaacagactcagagtttcatggccttcccttaaagaaatggtaacattggtagcaaggaaaggcacaggtattatcaggtgccgttaatattcttccaacccagtggaatctgaaattttgttctatttatgaagacttttgtgcagacacatctcttgccccatgagccagttcttcagcagtaacaatcccttctgaccaccaaagcgtgaaaggcaagattttttttttttcatagtgccaactctttgataccagactcagatgtccacttttacccttttgtttactgttcaccctttaatgtgcatgagaagggttcgatggagattccgctctggaacgtataacaactgccatattttctacagtaaataatagaaaatgtatttgttttgggttttagagtattataagactattaacctgagggctgaggcccagctaccgtcttccatcttcttgccacgtgggcttacagggcagagctactgcctatgtgttaatggcgggcagactggactcctaccttaatgatgtgtagagttataatattttgtatcccctgttgatgtcagtcaactgcaaaaccgcaacaaaaaacaattcccaagtgtttcaaacatctgttgttctctatatatcatttatttgcagttacgactctcccacagtaggggaatgaaaagctcccatctgctttttttgggggggttggggtatctgagtttatttggggattgtatgtaatttgaaagaaaaggctttttgatattgtgacgtgtacggctgttccacagtattgccgttgaaccttaataggtactgcagaacctacccagtgccgggtgggtccacccttattttctcagggataggaagttatgggaatcaaactgccaactgaagagggggtgaagaagtattggaacatgtgaccaccaccgccttgatgcgtaattcatcatttctaatgctgccacttagggcggttcttagtacttaaccccctccctcactgtgccaatctaacttatacaccagtgtatacctatatgtgtatatatgactttttttgtttgttatttcaaatggttatataccactggggtacaagccttatattgtgactgcttacccggatacactgtcggattttgatacggatttgtctctaggatgatgaggagaggtcgcctctctgatggggtttcaatagacaaggtgggagagggaaggggggatattttgttaatactttaaacactggcactacttattctgatctccgtagcaataataataaaccatggtaccgtgaataaaagagagtactctaaagctgaaaaaaaaaaaaaaaa

SEQ ID NO: 96 - DNA, 2176 bp, Xenopus laevis
gagaggcttgtgaatgtgttgcatggtgggacctacagtgagagctgcttcctactcctgctgcttctcacgctccgctggagaatggactattgaatctcccatcagcccctctcgcctgctcccccagtgcctgctcttgtgatcgcgctgcatgatcgctgctacaagtcacgtctctctcctgtcgctttacatttcttcccgagcaactttgtgcgtgtgtgtgcgggcagcactttgcacccatgctgcggggagaataagatccgctgcaacgcgtgtactcgggtaggagctgccgcactggggccgatcagcaggaggaagtggagagaagtgtttcgctttgagtgaaaatatcgcatcagcatggggaagcagaacagcaagttgcgccctgaggtcatgcaggacttactagaaagcacagactttactgagcacgagatccaggagtggtacaagggattcttgagagactgtccaagcgggaacttaaccatggaggagtttaagaaaatatatgggaacttttttccttacggggacgcttctaagtttgcagaacatgtattccgcacgtttgatgccaacggggacgggacaattgattttagagaatttattatcgctctgagtgtaacttccagggggaaactggaacagaagttgaagtgggcatttagcatgtacgacttggatgggaatgggtacatcagcaaagcagaaatgctggaaatcgtgcaggcaatctataagatggtttcttcagtaatgaaaatgccagaggatgagtcaacaccagagaaaaggacagagaaaatatttcggcaaatggataccaaccgagacggaaaactctcattggaagaattcatcagaggggcaaaaagtgacccatccatcgtgcgcctccttcagtgtgatccgagcagtgctggacggttctgagactgtttggattaaaattagcatttgctcatttcattttattttgccaaattacatttgttgtggtgtagccactttggtggccaaaagtaccttccttttgtgatatcagttttttttttctggattactaaaaatgttgaattctgtcaaaccttgtgcagaacactggctgcataataacaacctcatttccccccagatatttagtgatattctaaatatctgttctttgttgtgctccagtgttacactaatatgtagtaccttgtagtaccaaggaggcagcttgccacggtgttgctgcagaagtagcattggctaattccttggcactcttgcagcagctcatgttccatgggagcaattcagaaatactgacgtaatgactgtactatagtactgctacaggatagggtggtacataccaaacgctagttataaggtaatacagaactcttttttctggtatatttcttaagtaaccaccctccagtatttccagcaggagagttaataaaaatacgacctgtataacattacaatatgttattttcaagctttactgcagtttcttttaaaaacagcttcttgttccttttattgtgtgttttccatttcatattgatcagcattgactgttcaaaaaggggcaacaaaaacataagtttcagtttgagtctctattaagaggcaaaccgatcggtatccatctaagaataataatgtgcagctgaaacctacaggtagagccatggaaagttttctatgtgccaataggtatcaaacatatttgctgacttaaaggaagctaagacttacaataaaaaaagaatatggctagaactgctgtatttcatataatgaactatctattccagcctagaggttcagtagccctataacagtaatgatccaggccttcaacattgtcttggatcttgttaggccagctgctgagtgtcaggggcactgcacatgctcagtatgctctgggctgctgttgagaagctaagctttaaaactttagcagaaagtgagtattagaagcggatgctgcagattattagtcagttctgatacagaatgcactatgctgtcatgtatctaaaataattactcattgggctaacttcctgtattatatatagatatattatagtatataaacagtcctaatcgtgtctgcacccaaaaaaaaaaaaaaaaaaaaaaaaaaaaa

SEQ ID NO: 97 - DNA, 2428 bp, Xenopus laevis
cacccagcggagctccatcacccactctcctgccttggattctgccactgagctgctttaaggatttaagaggggagattgtcctactttctgagcttccaaatctttttgtctggtggaccctgaatagaacttagagcatcctcaaatggcaacgaaaattgacaaggaagcgtgcagagaagcttacaatctggtgagagatgataccaatgaaacgagctgggtaacttttatatatgatggccatacaatagtcccaggagaacagggtgaaacctatgaagaatttgtttctacttgcaaagatgatatcaggctgtatgcttacatccgattcataactggggatgccatgagcaagagaaccaagtttgtcctaatcacctggatcggtgaacatgttggtggcctccagagagccaaaactggtacagacaagaccctggtgaaagatgtagtgcagaactttgccaaagagttagtgatcacagagtataaagagctggaggaagaatacattaggaacgagttgaagaaagcaggcggagccaattacgatgcccaagctgagtagagccatgcctccgtggtgccacctgccagtttccagtcctgaagccaacaacgtgaaaactgcagaatactcgaggaagaaaaaccaagcaaataataactggttatttcttttgcaaatgcccctaaccttgctatccagcctacccgggcaaactggatgcactttgccattccacatcacattatctccatattcatctctgatagtgaaacactgacttgcaccaaacagatttctgcatggccatgctcccactggctactgacatataattagaagttattgtggcccttagcaaaaatctttttggggacactatatccccagaacgattaagacctatagcacattgattgaattttttaaattgaaatttcacatgttttagggtttcccttgcccccccctacacttctggatcctccagcagttgcaggatatgagctccttatagttatgcctatattatttacgcacatactgtacatttactggcatctgtcatgtaatttattaattcccaggaatgttaaacgtgaaacctagtgtcgcattctttgtacttgaccagataaagcttttaaattaaaaaaagcatatctttagacaaagaaaaacatttggaaactcctagttctataatgaaaaagtccaacctatcacctttaaataactcccagtatcacctgggagcctttatttatctgagaatgctgagagttgtagtttatcagcaggtggaaggacagtgtatggatttgtgtgctttttaaaaaaaatcctatggtattatttcctctagtaagcatgtatataaacactgtacaagggacatacaaagaggcgatcagagaaggctctagattttattttacatttacacattaaaaccaataccaagctctacacccaagtgcagtgggaactgcctttcattctatgttttatttacctttttttttttttttatagaaacatcaacgttcagaaatgacttgaaaatagttttacagtgtattgcttatcgtatgtgtagcatgttttttagggacagttgtgctgaaatacaggctttcatatgaaacagtcatttgtaatgtttacatttgtgtacataaaaaaacagaggcggaatatgagatatattttgtttttcctggagaagaatcttttggggggctcctgcatggttaaccattctggccctatacatattgcgccatgcagaccctttaaagtttctttaatatggaagagtactggaaaacacaataacacacaggagatttaatttgttttggttgcacgtatcttttattgataaacatctgtaaacatgccctgctgtttcatatgtgaccaacatgtagtttagcctcactgtgcctttaaacgttttttttttttttttttttttgcttcacgaccgtcatctctctatagaaatagtcagtggattgggcagtgctgaaagtgccttcagtctgttgcatgtgagtttggctactctgctttgaaaccagcacaaaataaagctgccaagtatatagtgattacctctggcagcagtgtaacattctgggtttctgcttaaacatgcaaagtaaggaaagcacccgctgctttaatgtgcttttatttctgtgggaacagtggtgctgctgtgcagtaacctgaaggcctataaatctggctgtgtctacaggagctgggccacttgtattgcaacagaacaaggaaatccaattaactggaatgagaagtgtgggacagcatcaatgctaagaataaaccacttgaacaataaaaaaaaaaataaagaggttttttttcaaaaaaaaaaaaaaa

SEQ ID NO: 98 - DNA, 2573 bp, Xenopus laevis
gtaagctaaggaacatggtggggaaactgtgcatatgacacgtgtgagctgctcagaaatggcaacagtcagtcaggttaaagaactggggtttctgcaggagacagacgcatggcgactacacagctctcagttccctagcaaagtcggagggaggcctgcatggctgggggaagtcggcgtgccagagcctgcggctttacagtgcggactgtgcggaaaaccattggcatttctcctgcaagtttacgcgccgtgtgctggcagcttccacaggaccattttcattttctgctgccgcaatgggagctgccacagggagtccgaggctcagtgttttaaagtttatcggaatcagctacccaggaagaacgacacctattcttatggccctcctccagaaacaggtccacctgatggagaggattgcattagtttccagttgaaatgtggtcttcgtctttgcagagtctgtggttgtttgggacccaaaacctgctcaaagtgtcataaagttaattactgcagtaaggaccatcagctgatggactggaaattacagcacaaaaaagtatgcagtgagcagtttgatgtatctaatattgaagttgtagaccatggatttctgttccctgaatttgagattgttactgaaccagaggatatggagggtgatagtggaagccaagatgaagaagatgaaacagtgaccgagcatgatacccaaattttatcagctgggattgaaacctctgtggacggcgtgaatctagatgagaaggagcttgaatcaatggcaaagcatgagacaaaagatgatatggtgtttaataattttaagaaaagtatagctttggagccagagcaggttttgaggtacagcagaggtggtgatccactatggatttctcgcaatcatatcccttctgagaaagatataccagactgctcctgtggaatgaaaagaaaatttgaatttcaggttatgccacagctactgaatcatctcaaagtagacagccttggagaaagcattgactggggggtcctggctgtattcacttgtgctgccaactgcagtgcagagaaccaatatgcgaccgagttcttatggaaacaggatgttgctggcgacacactgtgaaaaatctatttatacctggctacattcttgtagtttactttggatgacaataaaacatatatggttgtccctcaaatctttttaaggattgtatcagtgattaagatcatacaggtatgggatcaattatctggatcccctttatccagaaagctctgaattatgggatgggcttctcccatagactccatttttgtgcttgaattagttgattaaaattatttttttttctctgctaataaaacagtaccttgtacttaatcccaactagaatatatttaatccttataggcaaaacaatcctattgggtttatttaataaactctaaaaatgaatgtggctaaaaatgccatattgtatatactgaacttattgcaccagcctaaattttcagcttgtcaatagcagcaatggtccaggacttcaaacctgtcataaggggtcaccatcggaaagtgtctgtgacaatcacatgctcagtgggctctgagcagctgttgagaagttaagcttaggggtcatcacaaattatcaagtagaaaatgaggttggcctgtaatataaggtgatgctacagggctgattattaaattctgatgctaattgcactggtttctgtgctgccatgtaataataatctgtattaatttactaatcagccttatattgtgacatttctattctatgtgtactttatattgcgagagggtccctaagctcagtaagggacagcagcacagagcatgtgcaataaatccgcagaaaaaaagacggggagctactagggtatctttggagacacaatctttactgctaaaggttgccttgggctggtagaagcacaaaatatcatgtacaacatttctacctacttctttaattaggctttagttctcctttaaacaattgttttagtgtacttaaagtatggtgatccaaattatggaaatatggaaacccccaggtcccaagcattctgcataaaaggtagcatacctgtacactaaagttgtttccaccacaataacatgaatataagaaatcatcataccagcttaatatggttttgagtacaggcaatttaaaacactcttattgatacacttgggggcagatttattaagggtcaaaaagcttgaagggtaaagtgacattcacatctattaatgtaggactcagacaccagaatatttttgtaagggttaaaaagattttttaggagaaggtaacgttaaatgtctggtgtccagtaacccacatataatactctttaaaactgtttatgacataagctaaccaatcacataaagatctttgccgagctttgaccacttgataaagagccagagatggcttgaaacgttgctactattggtctgtgccatgtttgaataaaggcctttttattacattaaaaaaaaaaaaaaa

SEQ ID NO: 99 - DNA, 2553 bp, Xenopus laevis
gcaagaggagcttgcatggaggagtaattctggacattgatgagaaggcaaacacagaaaagaaagcccgagcccaattaggagcatcatccctcgctagccatgagctgtctggatgttatgtaccaagtgtacggtcctcctcagccttattttgcagcagcatacagcccttatcatcagaaacttgccttttactcgaagatgcaggaagcaccagagagcagcagtaccagcagcagtgccagtaccagtggcagctccttctccagccacgtgcccaccagcatcaaggaagaggagtgcagcccggagaaggagagacccccagaggcagagtacatcagctccagatgtgtgctcttcacttactttcagggggacataagttcggtggtggatgagcacttcagcagggccctcagtcagcccagcagttactcacccagcagcaccagtgccaagtcatctagaagtgccagtacatggagggacgcatctttcccaatgaatcaaaggagcttcccaccatcattttggaatagcagttatcagccttctgcagtttctgctccctcttccttgagcagtagcctagctagtcctctgagtggtccacatgcagagattccatttggggcagacccttattctccagcatcacttcacagtcaccttcatcaaggtcctcctgagccctggcaccatgcacatcaccatcatcatcaccatcacccttatgctattgggggagctttaaatacacaagggtccagttaccctcgggcgggtatgcatgaggtctacagcacacactttgatccccgctacagctccctccttgtgccagcctccgttcgacctcacaggatcaccccagcaggaacatctgcatctacagcacagtgtgatttgggaaagggagaaccagccacttctgcatggacaacacctgggccatttacagggccagcgacagacatgggacagagcattggccttaatgtagatgcagctcgtcgttactccttctgtggcgggactctcctgagctgatgttcttaaagattctgagtcaatccatttatccaacatctcggattaatcaagacctagaacagacctgaaccagcactaggactgcaagggaaggatgaaaataggactccaaatcacaagacttttaggagacaaaatacaattcttccttctttgctgagaccagaatttctatttaaattgttatctaaaagtaattggtgccaccccgaaagaagtatataaatatatacatatatataaatatatattaatataaattcactggcttacttttgacaaaagactctattttatggtgttgtgaatatttttaatgcctacgtgaattttactttccgtgcaagctacctgtttgatgatcatgtcctgtttgatgatcatgtccagtatatatataaaactgtacgtacagtgagtactatgctgataaaacagcacacacataaatgaaaggtcagaggactatatgttgatatacaatcctatgttgtggatggcaaagaaccacctgccccaagcttatagaattgcagctgttaaacagacaactgttcaaactccaaaaatatgacaagcaaggtggcacttcccagggtttagcccaacaattgcatttcttttttacaaggagcattttatgatgaaagaagaaaccctttagaaaactgacagcctttacatggaacaactgcaagagcaaaatgaaaggagatctccagagagctcagcatggacaattgatctcaggcagcttctgcttgtacgctgctgtccttctgtcactttgagaaacagagcaagatgtgtaagaacttgagcattacaaatatcttcttgttttgtaagaaaacataccattttaatttctgaaaaaaatatctcatcaaagagcagtggccccatatcctatttatgttgtttggcacattatgacttttgaataaacagttgtttggggctgacctaacaaagtttatttgtaacataagttgcttctgtcatgttcattgttcagaaaagttacttgtgggcttaacagttgcacactaagaacacttggcatgtcaccatttactatcatatgtagcctactaacttgtctccatagccataataaaacagatcaggcttttttaatgtaattaaaaatcacatctgtctagctcactgtttatttttgtgaaggctctggtgcagaaaaattagaactgtaatctgaaacaggccagaaagtaagtccacttaagaatttaagatttcattcacatacctttaaatgatgggcattaaagtgcattttataaataaaattgtttctgtatcttgtgatatagcagaatcttaatcagtaagggtgttaatattttgatatttcttttttttttgaccaatcagaaaatatatacatgcactgtcatgatgttatgactaaaagccaggcataatgccaaagcatgcaataaagcattatttaagaaaaaaaaaaaaaaa

SEQ ID NO: 100 - DNA, 1133 bp, Xenopus laevis
ggagggagaagcatctgaaagaaacagagcgcaaggtaaagaagattattccgtctttctctgaactctcttcttgaactaagcgccatgactctggcagcctataaagagaaggtgaaggagctccccctcgtgtccattttctgttcctgtttcctctccgatcctttaaagaaacagacttacaagtatgaagcagacactgtggacctcacatggtgtgctatttcagacatggaggtgatagaattaaacaagagagcctctggccactccttcgaggttatcctgaaacccccttcctttgatgggattcctgagatcacagccaccctgccccagaaacgagacccctccctggaggagatccagaaaaaactggaggccgccgaagaaaggcgcaagtatcgggaggcagaactccgcaagcaccaggcggaaaagagggaacatgagcgggaagtcatactaaaagccatcgaggagaacaacaactttagcaagatggccaaggagaagctggctcagagaatggaggtcaataaggagaatagggaagcccaccttgcggccatgcttgaacgcctacaagagaaggataaacatgcagaagaagtgaggaaaaacaaagaagccacaaggtagaaggtgttggctgacaaaacttggactgaggactccattgggcgtctgagagacccggcacaatattaagtgactcagattctcttttgctttatctgtctgtgaatgtccagagaggacctgctaagacacctttttgtaaggagtttttaaggtgggggacgcagtttatgggaggatctgtccacaccatttgcaagtcctaagaagtcgtctccatgagctcttcaatgttctcacatttgtcacccctcaagtgtgatccattcacaatcactaaaccaacttgctgtggtggtgagcgcaccggccgtctctaggctcaattgtaacaaaggcgccgatgaaccaatgggtatccacgctcgctagcgagattcttgttacattgcactgatttttatatgtctaccattatgtcattaatacaatgttactaccaggttaaaaaaaaaaacaaaaaaaaaaaaaaaaaaaaaaaaaaaaaa

SEQ ID NO: 101 - DNA, 878 bp, Xenopus laevis
gcgctgatagtgttggggttcaagatggtggtgatactaggatactgggacatcagagggttggctcattctatccgtctcctgcttgaatacacaggcacgcaatacgaagaaaaactttatgtaacaggggatgcccccaattatgataagagccagtggctgaatgaaaaagagaagctgggattggactttcccaatttaccatacctcgtggatggtgatgtgaagcttacacagagtaatgcaattcttcgctatattgcacgcaagcatggactttgtggagagtcagagaaagaaaagaactatgttgatctaatagaaaatcaagcgatggattttcgcatgggtcttgttgtaattgcttacagtcctcaatttgaaacactgaaggggccatatttagagaagctgcctattgctctgaaaaagttctcttgctttctaggagatagatcttggtttgcaggagataagatcacttatgtcgatttcgtgatgtatgatgtactagatcaacaccggatattagatccaacttgtctgcagaattttaagaatttgcaggcctttctaacccgatttgaggccctccctgctattgatgcttacatgaagtcctcgcgttttatgaagacaccgattaacaaccgcatggcatcctggggcaacaaaaaataaggcattctacacatggaagacttcactcttttgtttcacaccagaacatgtccactgttctgtttttgtttgtgtagccatcagatcactttctctctcccctacctgatgtccttttgtttggtaactcggtttacaataaagccatccaataagtaaccaacaaaaaaaaaaaaaaaaaaaaaaaaaaaaaa

SEQ ID NO: 102 - DNA, 3398 bp, Xenopus laevis
tctccacatggtggcgcgcagtgtatttgtttgtgctgtcatggccgctctactgcttaggagcggcgctcgagaagtgaggtgagggaaagttagcatggctacgggttccgttcacagctcgtccggcaatggcagaagccaagcggctactgtggtggatgaatttacagcacccggagacaagaaaagccttttggaaaggagccgcccaagggtccaggccttgttccctgttctgtttacagtgctgggatcgttagaaaccttccaccagtctgaagtgaaagaggacggggagaagccgtgtcggatatggctgcagctgaagggaggaaagcaagctgtgggcagagccaaggaatatctaaaaggcatctgtgagccagaaatggaggaaaagcagagttatcccaaggaaatgcactgcatctttgcaggggcccagggttcatttctcaatcatctaattcgggacacttatgcaaatgtgactgtaccagacataggggtcctcagcatgaaaggaggaaccgaaccagtagtaatggcgcagagccgtgttcagcagttcattaggctttttaatgataatgtcagtttacccaatcacaaggaacctgcagtgaaaaaaaagtttaaactgtatgtagaaaaacatgctgataagtatacagttgacttattgctgttgccaagtgcactaaaaagtgaactcctaagtcttgcatgtgatgaccaactttcaggtgaggatttctcaaggcagagttcagatgacaaagttgaaagccaagtaaaccaaaaagatgaagtgtctagaaacggcgcagggactccagtaacagaactaacaagtcagctagattctgtgttttcaagtgttgcagaagatagtccatgcttgatggaaaggccgtattctgaacaagaccgattgtcggttaaaaggcgaagttcggaagcagaggaaagattctccaaaaagccattttctttagaggctgttcaagtagatggccctgttaacagaaatgctgacacaaacaacgtgcccatcattgacttgatttcagaacctagtgactttgaagattcagtgatacttgtggaagccgatgacaatgtgagttcagaaacagagtataaaatacttgttaacttcttcaaaactatggggtattctcagaatgtagttgagaaggtaattggagatcttggacaatcggaggaaccattaaaacttctagaagaaatagaaaagcagagcaaaaaagagctgtacagccatcccagcagtaatagtacagagctgctgaaggccagaggtacatcaaatctacctaagtgtaaaattgccatcgctgagcctgtacagcagtctgcagcaccattaaaaacacaatgtaaagctttacttgccacagacaaagcaggaccttccaactcttctcatgacaaatcacagacaaaagcaactgtggcaaacactatacctcaagatcagaaaactactattgctccaactgaaagaccccttaataagcactctgaccctcctttaactggagtacagatattccaaaattctttaaaagttgaatatcgattagaactgaaaaatgagcctggaaaattggacttgaaacatattatcatagatggcagcaatgttgcgatgagccatggattgaaacatttcttttcttgtcgaggaatagccttagctgttgaatacttttggaacaagggtcaccggaatatcacagtttttgttccacagtggagaacaaaacgtgatccttatatcacagaacagcacttcctacagcaattgcaggaactgggaattctttcattcactccttccaggacagtgctgggagctcgaattgcatcacatgatgacaggtttcttttgcatcttgctgagagaactggaggcataatcgtaacaaacgataacttcagagaatttgttgtagaatcacctatgtggagggaaattatcaaagaaaggttgttgcagtacacttttgctggggacatttttatgctacctgatgatccattaggaagatatgggcccaagctggatgatttccttagcaagcagccaatcaatcgaaccatgcacagcagttctccctccagcaatgaaatgttcattccaagggatcattttgctcctccaagagctatggcaccaagaaacggactcaatcagcctatgacacaaagaaatggcctcagtcagcccatggcaccaagaaccgaactcaatcagcacatggcaccaagaactggactcaatcagcacatggcaccaagaaatgctctccgtcagccaatggcaccaaaaacaggactcagtcagcccatagcaccaagaaccggacttgatgagtccagtttatttcaactaattaaacctcaagaaccttttccaccagctgtgcacaatattgcccggcctcgtcccatcattcctccacagagaagtccctctgagaccatggaattaagagaagcccttctgaaaatatttccagagacagaccagagacataaaataaatgagatcttatcagcccacccatatatgagggaccttaatgcactgtcagcaatggtgctcgattaaagaacattgaacactagctgttactgaaaattttattttgctttggaaatgtggtctcagggataaaaccttatcacacatacaatttgtaaaggcaaaacctgtcacactagcagtcttaatgtacctgtgctgggaatattgtgcaagtctgcattcaagacatttaaaatgtaaatgtcgagtttgtgctgtacattatggagtttattattgaaattccttttcagaaagggttttattgtgcctcttaaacagtgattatttgatgttgtgtttatataaagaaacaagttgcgattttgtcatggaaaacatcttgtcatgtaggatgtttagttcatatttgtatatttgtacagggacaaataaaaaaaagttttgtctcaaagctgggcagatttgtatcaggcagtaacccatgacaaccaatcaggtttgctttaattattttacctgcagcttgctgcaaaaagttaatgagtgattggttgctattggttaccttgcaggtgcccagtgcagataaacaagcccagagtaaatttgcatatgttttgtttgacatacaagaatgtcacttttattttctatctgtttttaagcatcctgcacagtttctgaatacagaaagagtctctgggactttaaaatgtacaatgcagttggagtaaatctgttttgtttttaattagcaatgattggctggttaatgggcactaaagtttttatcctaagtaaaaaaaaaaaaaaa

SEQ ID NO: 103 - DNA, 2173 bp, Xenopus laevis
cgtaatcgcgtggtttggccaatagcagaaacgatagagctgtgaaccattacatttttttttgctgtggttactggaactgaaatgaactccttagagcaggcagaagatctaaaagcatttgaaagaagacttactgaatacgtttcatgtttacagcctactaccggacgttggagaatgttacttatagtggtctctgtttgcactgccacgggggcatggaattggctaatagatccagagacccaaaaggtttcattcttcacatctttgtggaaccatcctttttttactattagctgcataactctaattgggttgttctttgccggcatacacaaaagagtggtggctccgtcgataatagcagcacgatgtcggactgtccttgctgaatataacatgtcgtgtgatgatactggaaagttaattctgaagccgaggcctcatgtccaatgatcatctttttttccaacaccactggaaaactcagaccataatgaatttttatagagtttaaacagactaagtgtgcagcattagatggatataatcaaattctggaggagctgatttatgcacttgaataaattggccttagaaacactgtatacaaaatatagaatgcaactgctgtttcttcaattaagaaagcgatacaagggaaacgttgaggcgtgctgcagtaacctctgattctcataaataacctttcttaaccagcaatttgcatatccgaattatatgtgtcaaagcattctccaaccaaaaacttcttatgcataacgaaaaactgtaattctaaacagcgtttcaacatatattgattagatatttgcaaagttttaaagtttatatgaaaatgtaattgcaatttaaatcaatatttgttatccctttctgaagaagttctcctcctgatcttttaagtagttgcttctcctatattgtttcactgacctgacgcagtggtgcacagtatgtaaacattctgacagatactacttttaatagcagttacatttacaaataatatatgtatattgttaagttgctgcatgcaaaaaagtcattgggggaggattttttgaagtgaggctgtaaaatgtctcaatttttttatttttgtgttttatattttcattgtgtatactttttgtaattccagggttttaacttaacctgttttactgtgtaagtttagtttagggagtttgtattcagctgatcttttatcgtcacatttaagggccaaggcacaccgggagctttgttgcctgaggttaaatatttgctactgcagacaacaaatctccggaaaacattgcataacataaaactaagattgccgggagtaatagtttttacttgcagcaatcttaatgttatgctatggaaagtcttttgggagacttgtcgtccgtggtagtgaatatttaacctgtgtgctatcttcctaaagagaaagaaggtctaaattactggcggtgccaaattttatgcactccgtagtggttgtaatcactcacctgaaacccaggctagtgctcctgttggcagaaacctacactaatactaggtacttttcattgagcaccatggagtgatccacttcctcctctttttcttaaataccccagtgacaatgcatgcgcagtaaagtgaaaaagccatctatctttgttaaagtttgacttttcgctctccttcacatgcgcagccaggtgcttgcaaagagaaaagaagcaggtaaacaattgttccatggtgcttgcacagaagtaccctagccttgtgcattgttttgccacatgagcaccagcctggtataatgggtgcttacaatcactgcgaggtgcctaacatttctaaaattactttccttctcttttaattcagatttggtttattggcagagcactcaactaatgtattttttgaagatttacactaccctcaatattaggtggtgcaggatataagatttaaattgagagatacttttcgttaattgctttattctcttttaattcacaattatgtacatatcttaaaggggaactaaagtctaaaatagaataatgccagaaatgctgtattttgtatactcaacaactgcacaacaatcctaataaaacaaatgatttattctttcaaaaaaaaaaaaaaa

SEQ ID NO: 104 - DNA, 1993 bp, Xenopus laevis
ataaacacaggaagagaaggtgtaagtggaggaagagagttgaatgaagatattaaaaacagtacaaagcagtgcagatatggcagaagaattacggaggttcctatacaagaagctaacaagtgttgaagggctccacgctattgttgtgtcagacagagatggagtgccagttattaaagttgccaatgagaatgcccctgagcaggcattgagacccgccttcctttctacatttgcactagccaccgaccagggcagtaaacttggtctctccaaaaataagagcatcatctgttactacagcacataccaggttgtccagtttaatcaactgcctctggtagtaagcttcatagccagcagcaatgccaatacagggctaattctcagcttagagaaagaactcggctccttgttcaaagagcttcgtcaggcggtgatctcttgatgtggaccatctcatgtcacactttttttttggaacttaaagtaggaaaacaagatgcaaaatatattattttgtaaatgttgcacattttcagtattcccataactatgaaattctgctttcccgtttctgcaaactccactgtttctccctgctcactcctagcatttgcctcatgtacttgtcatacagcagctcatgctttagcagtgtatatacattatagtacagtatatatgactagtatatatgaatagtgcagggcccagactgcagccctttgtttcaagactcttcaaggctcttttgctaataaagtgtagtcattcacagaaaccttcagaatacttcccattggcactttgcgttattttctttttaaagcagttactttctcaaaaccctggcatgcttcagctgagaaacttcaactttgctcttatttgtaggggtggtttacttttacgttaacttttattttgttataaaatggtcaattctaagcaacttttcaaatggtcttcattttttttatatagttttggaattatttgccttcttctgacactttccagcttttaaatgggctaagcaaaatgctctgtaaagctacaaatatattgttattgctactttttattactcatctttctattcaggcctctcctattcatattcctgtttcttattcaaatcaatgcatggttgctaggggaatttggaccggaaattggctgaaattagctaaataagtcaaaagctacaaataaaaaacaattgcaaatggttttagaatatcactttctacattatactatgggggttatttatcaaagtccgaatttctcttaatatattttctgaaaaaaactcaagaccaaatccgcacaggttttttgggcttatttcttaatacactttcctggaaattttgtttgcagggaaaaaacgtgaaaaaaagtttcacaattttttcagatttttcacctgaaaactcaagtattttgcctaaaaactccaaaaacttcagggtattgccaaaaacccagcaaacatcaaaaaaccattgggacttctcccattgacttatatgcaacctcgacaggtctgagatgccggattttctgattcagacttatccatcctcggggtttaataaattccaaaaaaatgtgattttttttttaaaattccagttttatcaaaaaaaatcacgaatttttcatgatttttgcattcggaatttattaaatgaccccctaaaagttaactcaaaagtggaaaccccctttaagtagagtgacagctctagggagtcgtaatcaacttgatctccacgtgtcgcttgtctggatcacttctaattggctgttgtcattgtatacattgcgtttaggacacaggcttaagaattattttgaggaaggtatgaaaacctttatcatgtgaactcatgaagtttattataattgtatatttcaatactttaataaatgggcacaaggagcaagaccaaaaaaaaaaaaaaaaaaaaaaaaaaaa

SEQ ID NO: 105 - DNA, 2307 bp, Xenopus laevis
cagcttgaatacaatagcaaaacaccgaggatgctctggtcggaaacataacagtcgctggatatggaaagatcagcatcattatgttgccatgaaaatctgtcccctcaagtacagtgggtatgtatggagagtgctatcacactgtggcagttcctgttgcaattgctactcgaccagaaacatgagcatctcatctgctggacatcaaacgatggggaattcaagctgctcaaggctgaagaggtggccaaactctggggactgaggaagaataaaactaacatgaactatgacaaactgagtcgggcccttcgatattactatgataagaacatcatcaaaaaggtcattggacagaaatttgtgtacaagtttgtttccttcccggagatactaaagatggatccgcactcggtggaagtcagcagggagagtgtattgctgcaggacagcgactgcaagatcccgtctgatctcagagaacatcataaacaaacactggcagcgctgagaagtgccagtcggaatgaatatatccactcaggcctgtattcctccttcactattaactccctgcaaaaccagacagagaactacaagtttatcaaaacagaaaacttacaggaacatgaagaggaggaggaaaaggaagaagaggaggatgaggaggaggaggtcaaaccatccatcaggaacttggtggaggaaaccagaactgttataagatttgttacaaacaaaacagataagcaatctgtccgaccagtggtttccttgccagctacatcagaatcatcagctttcctttcctcctctttttctaataaaggttcttctctaaagtaccccaatgtagctagtgtgtcctcagcatctacttgctcttcccgttccccatccctgtcccccagtctgtcctacccaagtgaccagagaagtctgttccttgaatactcctgtcatggcgcagattccgtggaaccattaaacctctccgctagttccaaatcaaaactatcaaaactatcatcatgccatccacccaaagccaagaagcccaaaggcctagaaatctgctctccgcctctgcttctctctagcagtgatattggatccattgctctcaatagcccagcacttccgtcaggatccatgaccccagcatttttcacagctcagacaccaaatggattactgttaacccctagtccactgttgtccagcattcacttctggagcagtctcagtcctgtcgctccattaagtcctgccaggctgcaaggaccaaacaccttgttccagtttcccagcctgctgaatggtcatttaccaatgcagctgccaggattggacagagcatcatctccagtgcttctatcatccaacacccaaaaatcctgatgcactatgggaaggactttaataactcataatacccataataatctccctttccaggagcaatctgtgaagagcatggccattttcacttggcactttttcttgttgtttacctgagttcagttccaagtgttgtacataacaccaaatgaatcggacactcccagcatgctcctccgttagctatgaattgctttaaactgtagtttaaaggctactaggagaaccacaggttggctctatgtattaattgtaacagagcatgtgatatacagtaggttttgtatatgcaaagtgttgagcactgttgaattccatttctccagttgacactgtgggctagttatactaaaccctgtaaggcttatacttggggatggaagccagattgcaaaacccccaaaaagctgatcatttaagtagtgatcattgcacagctcagcataatctagttgtgccagtagtatccctggacaagccaatgtttgccttatgttatgcacttgagcttatggaaactataaccgtctgtgccttctcttgcatactacatttttgtgtattttacattatggataacacttctggggaagtaacctgtattagggcaataaaaagaaaagtgtcatattttggtgataaacccccccaaaaaaaacaaccaaaattgtaatcacttagcgtccgattttcattttttgccctataactacatcccccccccactttagattgacatgacctctctttcttagaattctaagcccgagttcccaaacttatattccagacttatttgtatttagtgcttttcatttttattgaaatatggcctgaaacgttttttcttaatttgttgagaaaaaaaaaaataaaaaaaaatgtcacaaaaaaaaaaaaaaa

SEQ ID NO: 106 - DNA, 2994 bp, Xenopus laevis
aaaaagtttcgcgcgctcttgcgttatagggctttgtgtgctcttcattcttgtttcctgtgcttgctgctttcttctctgttagaatgtcgggatttgatgatcttggagtctactacagcgatagttttggcggagagcagcaggtgggtgacgatggacaagccaagaaatcgcaactcaagaaacggttcagagagttcctaaggcagtatcgtatcggcaccgaccgcaccggcttcactttcaaatacagagatgaactcaagcgtcactataatcttggagaatactggatcgaggtggaaatggaggacctggctagctttgatgaggatcttgccgattatctgtataaacagccaactgaacatctgcagttgctggaagaggcagcccaggaagtggcagatgaggtgactcgcccacgacctgcaggcgaagagacaatccaggaaatacaagttatgttgcgatctgatgccaaccctgcaaatattcgcagcttgaagtcagagcaaatgtctcatcttgtcaaaattccgggtatcatcattgctgccaccgctgtgagagccaaggctaccaagatttccattcagtgtcgtagctgccgaaatacaattggcaacatagctgtacggcctggtctagagggatatgccatgcctcgtaaatgcaacacggaacaagctggccgtccaaattgcccattggacccttactttattatacctgacaagtgcaaatgtgtagattttcaaactttgaagctccaggagtctccagatgctgtgcctcatggagagctcccacgacatatgcaactgtattgtgacaggtacctgtgtgataaggttgttcctggaaacagagtgacaatcatgggcatttactcaatccggaagagtggaaagacctcaacaaagggccgggatcgagtgggagttgggatccgcagctcctatataagagtagtgggcatccaagtggatactgaaggcacaggaagaagcgcagcaggtgctataactccacaagaggaagaggagtttagacgtttggctgcaaagcctgatatctatgagactgttgctaaaagtattgcaccctccatttatggcagtagtgatatcaagaaggccattgcatgcttactgtttggaggctccagaaaaaggcttccagatggcttgacacgaagaggtgatgtcaatctacttatgcttggagatcctggtacagctaaatcacaactgctgaagtttgtggagcggtgctctcctataggggtttatacatctggcaaaggcagcagtgcagctggcctcactgcttcagttatgagagatccagtgtcccgtaacttcattatggaaggaggtgctatggtgcttgctgatggaggggtggtctgcattgatgagtttgataagatgcgagaagatgacagagttgctatccacgaagccatggagcagcaaactatttccattgcaaaagctggcatcactaccacactaaactcccgctgttctgttttggcagctgccaattcagtatatggacggtgggatgacaccaagggagaagagaatattgacttcatgcctaccatcctttctaggtttgacatgatcttcattgtgaaagatgaacacaacgagcaaagagatatgactcttgccaagcatgttatgaatgtacatctcagcgcacgtacacagagttcttccgttgaaggagaggtggacctcaatacccttaagaaatacattgcctactgcagagcgaaatgtggtccccggctttcagctgaagccgcagaaaagctgaagaaccggtatattcttatgcgcagtggcgctagagagcatgagagagagactgagaagagatcaagtatcccaattacagtcaggcaattggaagccattgttcggatatctgaatctcttggcaagatgaagctacagccttttgctacagagaccgatgtagaggaagcactaaggttgttccaggtatccacattagatgctgctatgtctggaagcctttcaggtgtggaaggctttactacacaggaggatcaggaaatgttatcccgcattgagaaacagatgaagaaacgttttgcaataggttcacaggtgtcagagcacagcattattcaagattttctcaaacagaaataccctgagcacgccattcacaaggtcctgagccttatgatgaggagaggagagattcagcatcgattacagcgcaaagtcctgtaccgcatcaagtagaagagagaaccgtgcatgtgaaaattgcttgcagctctgcattggagaccattgcctcagcatggccacctgtgaacatattcttatatttgagactattcaagagactggatagaatatgtagctgttaatagactgaaatatattgtgaaattttgcatacaaggtcagatttgtcatacttcaagtaactacaactatataatgatgcagttacatatttttcagtgactcacaaagtcttgtatataattatctatatatagattgattgaaacagttccttcattgcattttgatgggacagtaaatgaagggcaaccctactctcccccaaagcaagtactcctaggcaacattggcaaacctggctggtgttatatgcaaacaaatgccataatttactctcttccagtgcaggcctaatcgataatttaccaggagcaacattgcattactatgattgtcttgtgtagtggaattacgggagactttgagcagagctgtaaaggtcttgaataatactccatccatctggtctctatacaaacacttggactttacaaaagataaaaatggccaaaaagctgttgatttctgatgagggaatctacttcatacaagctaaactgtgttgaaatgtattctgttatggtcattttgggtttttgtacttaatataaaaatacaagttcattgc

SEQ ID NO: 107 - DNA, 1938 bp, Xenopus laevis
gaattcggcacgagatcaagactacgcggaagcgcagtgacgcacaacgttgccgccttgtgggcgtgtcgagctggtgtaacagcgttgcacagtcggaagctgataaaaatggctgttaatgtttattcaacatctgtgaccagtgacaacctgagccgccatgatatgctggcatggatcaacgagtcgttgcagctaaacttgactaaaatcgaacaattgtgttcaggtagtgtgtactgtcagttcatggacatgcttttccctggagcagttgtgctcaaaaaagtaaaatttcaagctaaactggaacatgaatacatacacaactttaagctcttgcaagcgagcttcaaaaaaatgggcgtggataagataattcctgtagacaaactggtaaaaggaaagttccaggacaattttgaatttgtgcaatggttcaaaaaattctttgatgcaaattatgatggaaaagactatgaccccgttgcagctcgccagggacaggagacggccccagctccagtgctgtctgctccagtcctgaacaagcctaagaaacctttaggctctggaaacacagatgatagttttgctggaggatctgaaggaaaagcttcaagaacagacccaacaccaggtttaaagaaaatggcaaaaattgctccccaaaggacagtgcctgttcagagaactacagtaagtaacaagccagcccaagggatcagcaagaagccagcaactgtagggaatggagaagatgaatctgcagagctcattcagcagataaatgtactgaagattactgttgaggatcttgaaaaggaaagagacttttacttcggcaaactgagaaatattgagctaatttgtcaggagaatgaaggtgaaagtgacccagttttacagaggattatagagattctatacgcaacagatgagggttttgttatacctgatgaaggagcaccccctgaagaccaagaagaatattaaataaacatgcaaggatcgcagttgtttaatgcccaaatcatatgcttaatgttaaatacccccttttattctcagagggctgtttctctgcaccgggggaggggggggggcaaacacctctccttttgagagtgcactttgccaaagtttcactcattttgcagggcttaggtatggaacatattatgggtttgcggcaggaaagtgtgtgtaatgggctgatgaaggttcagttattggtgaaactgtttgttgtacagtatacataccaatgccttaaggggtttttctaagtcctacagtaaatgtgtgtctgggcagtaatgcttattcctgactgagcagcttccttccagtgtatagtgcatgtgagtactttagcgttggaggggctgcttcttgtgctgtatccctctgcactacctctgctctgtctgcagatggaattaagattgcaccctccctggcagcctggggggttcacatttaatatgtacctgtacaaaaatgagatgaaattttgagtggcaaacctctgagttttcagcattcccctcttcacatgaattgttgtcggacaacctcttcctttgttttaacatttggagaccttgtatttatgttcctttctccttctctttatgtatctgctgtacccccactccatgtcttcaggcttcacctctggaacaggaaccctgctgtttttacaataaattgggatttggtgatgccataacaaagtgggaattgctttattacaccttcacttcctgtgcttcaatagtcggtcacttacagtactttctagttctcttctgccattttactcttcttcttctctttttatttggtttcactgagtttttctactttaaatattttctaaataaaacttctgcatttcaaaaaaaaaaaaaaaaaaaaaaaaaactcgag

SEQ ID NO: 108 - DNA, 1070 bp, Xenopus laevis
tggcctggcagggagcctgggaggagcttggaaggctgctagagaggcaggtctatgcttggacttagtaattgttgcgcgttagtgattgtagtggaagctgctaaagctgctggagggggagtttcccggtgtgggattcagtttgcatcccagacagacggcacacagtaatcaggatcccccgcagcagggttacaggataagctgcaccatcccagggagcatctgtcacacctgctgtaagaagatctcgtgtccttgctggccggctggcacactggcacaggatggtcataaaggtgtttttagcctcttcctccagctttgtgactatcaagaagaggcaacaggaagtgttacagtttttggaagccaacagaattgaatatgaagaagtggatattactatgttagaagaaatgagacagtggatgtacaaaaatattcccaaggacaggcttcctgggcagggcaatccactacctccacagatcttcaatgacaatgcctactgtggggattatgaaagcttttttgaatcgaaggaaagcaacactgtcttcttattcttacaactgaaagcaaggccagcacaaaaggaactttagaagaatgtacgatcggaagataataagcacagggcacacagcatagccccatcatctgttgttctgaggagccaattgtctgtgacagttcatggactgcatcaccaaaggatatattttactataatgttaggtgcagcagatgtcatagaggttgactcaatttcccaggatctaaccatacaaatgggtttctgcctggcttgaagagaatgttttctttaaacaccagttgatctccatatcgcccatatccttcatgtcaaatattcaccctattcattacatccttaaacagttgtaattcatgcttccattccagctaaatgactcttaaatgtgtctgccgattctactgctacttttagctgctggtcttttgtttctgtgttatgtgtacatataacaaaatttagaccacacaataaaaaattttatgaccaaaaaaaaaaaaaaaaa

SEQ ID NO: 109 - DNA, 1347 bp, Xenopus laevis
ggtttccggccagctcatcctgatctctagaccggctgtgtgtacgtccgtctctcccgcagtcaccatggtcctgctaacgatgatcgcccgagtggcggacggactcccgctggcagcctctatgcaggagaacgaacaggtgaaatgttcatatgcaggcagagacctgcagcagtaccagaaccaggccaagcagttgttccgcaagctgaatgaacagtctccaacgcgatgcaccctggaggcaggagccatgagctttcactacctgattgagaaaggcgtttgttatctggttctctgtgaagctgctttccccaagaagctggcctttgcttatctggaagatctgtattcggaatttgacgaacaacatgggaagaaagtgccaacggtctcacggccatactcctttatagagttcgataactacatccagaagacaaagaagtcatacattgacagccgagccagaagaaaccttagttctgtaaacactgagctgcaggatgtgcagaggatcatggttgctaatattgaagaagttttgcaacggggagaagcactttcagctttggattcaaaggccaacaacctatcaaccttgtctaagaagtaccgtcaagacgcaaagtacctgaacatgcgctccacttacgccaagctggccgctgtagcagtgttctccatcatgttcattgtgtatattcgattctggtggttgtgaaggagaagaatttggaggaaaaacactgtgaagatgaaagaggattggggggagtgtttgccaatgtcttaaccctgtcactgctagtggccatggctgcagtgatgtggttaatggaagctgcacatctcagcgtgcatagagatcactgatgctctatcctcagagctggcttgtagggaacataaacattaaacttagtgctccttttccagtggccagcaaggagtaagaatgcacatggattagttcctttaacttgtcatctctacacatccaccctgaactggttcatatgaaccctcccttgctatctgacagcaaatacctggttactcacctacccctcttatcctactaatataataagccggtttgctcccaatctgtgccctgcaggccttgtagggcataaaccgatccattacaatgggatacatgtgataaatgcctgaacacgttgggctatatttatcaaactgtggcgatctctaacttcacacttgggtgaccaagtagtaacataattatattgcaattattgccaattattaaagggattttacatgtgtaaaaaaaaaaaaaagaaaaaaaaaaaaaaaaaaaaaaaaaaaaaa

SEQ ID NO: 110 - DNA, 2417 bp, Xenopus laevis
agctccagcccctgactgcaggggaacatggagctgcccgccgttggagaacatgtgttcgcagttgaaagcatcgaaaagaagcggatccgcaagggtcgtgtggaataccttgtgaagtggagaggctggtcctcaaaatataatacatgggagccagaggaaaatattttggatccaaggctattggttgcgtttcagaacagggaaagacaagagcagatcatgggatacagaaaacgtggccccaagccaaaaaataatcttgtttctatgccatcgtttgctcgccgctcgaatgttttgagtggacttcatgattcctctggtgaaaaccgaaccaagttggacctagggcctattcccaagagccatcaatatcagctaaacagtaaaaaacaccaccagtaccagcctagtggcaaggaccacaatgaaaagcatcattccagtaacaagaaaaaatactattatcagctcaatagcaaaaaacatcatcactaccaaccggatcctaagctgtatgaacagtataccattgaaaaagagtctcaaataagtactgatgtcagaaacaggcatagagattccttgacacacacacaggctgcagatatggggactcaattgaagaatggtacagattcagttattagtgggccagaaaggaatggcatctgtaatggagtgtccagtagtccttcaacagaaatgtccagtagtccttcaacagaactgtccagcagtccttcaacagaactgccaagcagtggtgttggagggaagatgaaaattgtgaaaaataaaaataagaatgggagaattgtgatagttatgagtaaatatatggaaaatgggatgcagtccgtaaaaataaagtcttcagaggaggactgtgacatgggagatgtgaggagaaggtttgattccccaggcacccttaatggggacaaaacatgcacagcccaggaagaaaaaacagagcattggaagaagcgtgtggaatcccgggtaaagatacatgaaggtagtaaaagtgtggacaaagggtcagtacatcttgcaggcctcagaaggacttattctactgccagtgaaacgttaaatgatcaacccttgcagctcaccacaaagagtagccatgttcctatgccaaataggaccagatctcctgtttatgcaggggagccctacaatgatttagtttatacaaatccaagaaaacgttgtttgtcagaagcaaatgggaacaaggagctttgtaagaagactcttacatctcggagtgtgagtgctcccggcatagtggaatgcaaaggtggtctgacccctcttaacgtacctttacaggaaccagatatcattctcttagactccgacttggacgaacccatagacctgcgctgtgtaaagtctcggtgtgacagtgaccaagaggtggacaaacctgagattcaagtcacccagaatcctcagtcagttgatgtggatgtttgtgagtctcagtttaaacctttctttgggaatattgtaattacagatgtcacagcgaattgccttactgtcacttttaaggaatatataacagtgtgactcttattccttttgaactgcatatctaactgacgctttccagcccaattggcatgatttttaatctgccctatggacacatttattaatatatatatctagaagtgcctagcagtggctggattctaataacttgttgccatccaaggatcatcatgacaaagctcttaaatccaagtctgttttgaatgaagcctaggttaataattgtttgtttatttattttatatttatatacctggaaataatcagctcttcaatgttcttgttctgtctgggaatttctggtgtttagcagtcaatgtttcagtgtttcaccttattacacaaacgaaagagagaggagggtgggctttataccttgtgttttttgttgttttttttttaacatttatttgaattttgtttgcaaaaaaaaaaaaatgacgagctctttctagtatatgctgctattagaattgttaatgcttcctgtagctgcttggatgtaaaaataaatggagaatcgttatgtgagcagcatgaagctgtataagagaggactgggtatatccaggttccgcttcaaattctcctccatgtgtaaaaatattgtattgtgtaattataatacagggttataaaaaggactgtgtttccaagtcttgcttcagtatgtatttatgttcttcatctgcagacttacattgtcctctggcatgcactcttaactgtccctttagtagcgctttaattgaaataattccagatccttttctatcatgttagacaaggaaaataaaattgtaatacttacactatatacatttttttaaaaaaaaaaa

SEQ ID NO: 111 - DNA, 1554 bp, Xenopus laevis
gaattcccatagcaacaaacagtacccatagcaacaaacagtagagaagtcaacatggcagagttgtggctatcactttcttgcatgttctccttgcttctactgacaaattcatctccacttaccttccaggaaagaatgctccttaaagccttggggctgaacaccagaccaaaccccattgctccagctcctgtacctaaatctttaagagacatttttgagaaggggataaaccaggacaatccctgcatgatggaaggtttcggagtacctggaaatattgtccgctcatatcgagatcaaggaaccatagcagccatagaggagccacaaggatctctgtgcttaaagaaatttctcttttttgacctatcagcagtggagaacaaggagcaattgaccctaggccaactggaaattaagttcaagcacaacacatattatggacaacagttccatctccgcctctaccgcacccttcagctatctctaaaagggatgagagacagcaagatgaacaggaagctcctggtgactcagtctttccgtctccttcacaagtccctctatttcaacttgaccaaggtggcagaggactggaaaaaccctgagaagaatatgggtctgatactggaaatatatgcaagcagtgaacttgcaggaggcaatcgatcatttgtagtatgtgaaccaatacagtctttcatttacacttctctgctcactgtgtccctagacccatccaattgcaaaactcaacgagccaagaggagtactcattcatcacctccaaccccaagcaatatctgcaagaaaaggagattgtacattgacttcaaggatgttggatggcagaactgggtcattgcaccccgtggttacatggcaaactactgccatggagagtgcccctatccactgacggaaatgctaaggggcacaaatcatgctgttttacagactctggtgcattctgtagaaccagaaaacaccccattgccttgctgtgcccccactaagctgtctcctatctccatgctatattatgacaacaatgacaatgtggtactgaggcactatgaagatatggtagtggatgagtgtggttgcaagtgagtttgctttggagattgttctcattcccttatctaagccttaaacttatcctctaaagggactgctgccaacctagttatgaagcctcgcgcctcgtgcgacagtgactttaaccatcttacataacattaattgataagactatatttattttggggtgtacttgccctttaggtggtttggcaaatgccatgcgtggctcttaacagagctgctggatgaaacacatttttaaaaaagtatattgttgtcaataaatgtttttatctttatatattgggcatagagctaggttggtgcctgaaaattgcctagcacttgcaagtacagctgattgttggaaataaatgtgatttaacccaaaaaaaaaaaaaaaaaaaaaaaaaaaaaaaaaaaaaaaaaaaaaaaaaaaaaaaaaaaaaaaaaaaactcgag

SEQ ID NO: 112 - DNA, 815 bp, Xenopus laevis
ggcacgagcagacatttctatagtggaaattaggtgtcttgtcaatatcagaaagtctcaggagccatgcagacttcatttgttggatactttactttgatcttctttcttctttctctgatgaaggccaagggcagtcctgcatacagctctgtcctgtcatctgatctgacagacttaaagaatattctggagcgcttggaagacagagtgactgcagaggagccaatggccccatcccaagatttatttgctcagaattatgatgctgctgactcttctaactctgctccttcttggactggagaggctataagaccccaatctgatattatatataacaaagggtcttcgtgggaaacacctgataagttatcccgactaaaaagcaagctaagagagcttttgaattcaccaaggagtttaagaaggtcctcagactgctttggaggacgcattgacagaattggagcccagagtggcatgggttgcaacagccacaggttttgaagaagccaaccagaagactgaagagtcctcttctgcaacgactggactatcttacgaaatctgaaacaaaataattatttatggcaccatgcaccaaattcacatttgcagaaatgtcttgtctaaaaaaaattatttttctacatgcaaatttgtttttaccagatcactcacatcattacagtgtccattgagattgtgtaaaccctcacttctgactgaagaagcattacataacagaattaaaaatgtgttacgctctgtgttttgtcgtgtagaaacaaaataaattatatttattactt

SEQ ID NO: 113 - DNA, 2252 bp, Xenopus laevis
aagatggcggcggcagacggggatgattctctgtatcctatcgctgtgctcattgacgagctgcggaatgaagacgttcagctccgccttaacagcattaaaaagctctcaactattgcattggccctgggagtagagagaacacgcagtgagcttcttccattcctcacagacaccatatatgatgaggatgaagtacttcttgcattggctgagcagctggggacctttacttcattggtggggggaccagaatttgtacactgcttgctgccaccgctggaaagtcttgcaacagttgaggagacggtagtaagagataaagctgttgattctctccgtgccatttctcatgagcattcgccttctgaccttgaagctcattttgtgccactggtaaagcgtttggctagtggagactggttcacctcccgcacatctgcatgtggcctcttcagtgtttgctatccacgtgtctccagcacagtaaaggctgaacttagacagcatttccgtaacttgtgctcagatgatactcctatggtgaggcgagctgctgcttccaagctgggggaatttgctaaagttttggagttggaaaatgtaaagagtgaattaatacccatgttttccaacctagcatcggatgaacaggattcagtgcgcttgctagcagtggaggcctgtgtgaacattgctcagcttctgccccaggaagagctggaaccactggttatgcccatactccgccaggcagctgaggacaaatcttggagagtgcgatacatggtggcagacaagttcatagagcttcaaaatgctgttggtccagaaatcaccaaaacagacttggttcctgctttccaaaatctgatgaaagactgtgaagccgaagtacgagctgctgcctcccataaagttaaagaattctgtgagaacctgtctgctgaatgccgtgagaatgtaataatgacacagattctgccttgtgtcaaggaattagtctcagatgccaatcaacatgtgaaatctgctctggcttcagtcattatgggcctttctccaatactgggcaaagacaacaccattgagcatctccttccactattccttgcacagctgaaagatgagtgtccagaagtgcggctgaatattatctcaaacctggactgtgtgaatgaggttattgggatccggcaactgtcacagtcactccttcctgctatcgtagaactggcagaagatgccaaatggcgtgtccgactggcaattatcgaatacatgcccctacttgctgggcagctgggagtggagttctttgatgaaaagttaaactctttgtgcatggcctggctggtggatcatgtgtacgccattcgagaggcagcaacgagcaacctgaagaagctggtggagaagtttggcaaagactgggctcaggccaccattatccccaaagtcctggcaatgtctaatgatcccaactacctacataggatgaccacactgttctgcatcaatgtgctttcagaggtttgtgaacaagacatcaccaccaagcacatgctccctactgttgtaaggatggctggggatgctgtcgctaatgtgcgctttaatgtggccaagtctttgcagaaaataggacccaccttggacaacagcaccctacagaacgaagtgaaaccagtgctggagaaattaacacaagatcaagatgtagacgtgaagtattttgcacaggaagccctcacagtgttggctttggcatgaggacagccattaacagacactcgccatgaaccttctctatcacctgctcgtgtttcttctcatggctgcaccagaaatccatcttttcagtgcggtctcgttttcctctcatcacacagccgtctggatggctccctatctccctcttcactactgaacgttattatcaataaattgtaactggctgtggcttttaaccccaacatgctgtttttatgtcccagggacatgtcgagggggtggggggcatcataacattttcagggctgctttgtttataccctactacagaaaaacatggcagctttctgtgtgcgtggaaacaagttatggattcatacatgtattaagtctttatgcacttgagctgatgtaagtaaattgaaattgcctcttacttatatacattaacttttaaagttgtttttcttctttttttttaaccaataaaaacactaaatattaaaaaaaaaaaaaaa

SEQ ID NO: 114 - DNA, 1089 bp, Xenopus laevis
atgatggatcctttggacaacggtctcttcgacttaccagactatgagcacacagaagatgagaattttccacctttgcctccaccgcactcgccaggagctgatgatgaagcagatgatgtggcaaatggagacgactggacagagaatgctggacagacacagagagaggaagccccaaaacctgccagacgggtagtaaaaagaccccagcctaaactggacggacaaaggcttgcctcgcagcgtggattgccagccttgcggcatatgtttgatgatgttaaatttaaagggaaaggccatgagacagaagacctaaagatcctgctcagacagatggagaactgggcgcacagactgttccctaagctacagtttgaagactttttgaaccgacttgaatcgatgggaaacaaaaaagaagtgcagacttgtttaaagaagatccgtatggacctccccattgtacatgatgattttctcagtgaagaagttgtagttcagacagaggatcacgccatagacatgccctctgaagacttctcttttcccgacgagctccatgttccttctccgtcacagcctgttaaggtggatctgagtgaggagactctgcagcggattgagaggaatcggcgcttggctttggagaggaggatggagaagatgcaagcccaagcagagagtcaggctctgtctcaggcaactcagtctgatcccaatgaaattcctgatgatgcttttgatgcagaaatgctagatgctgttgagagcatgacgggcatccccacagcctcacagtctccacctcatgttgataaagacttgtctcttgttctacatagtcacgacctgcctgtgcaagacgtcagccagtcccctgcaccatgtcccaaaccacagggtgatgccccgtcagagaaagcactcagtcttgttcattctgctctcccttcaacctctgaccctacctcaccaagaaagcctcttacagaacaattgcctgatgattcagatgcagatacttcaagtgccacgccttacactgaagcccctgcttgtgcaaacactaaagaagaatattga

SEQ ID NO: 115 - DNA, 4871 bp, Xenopus laevis
ccgggcaggtccgcgcgtgagaaggcacagcacagtccctggcacaggagaaaggatggagttaaaatgtttgaattttgcgattcacacaccagatccaagagagaaataggaggagttccagtataagccaaagttgctgatatgtgttcaagatgagtgggatgggagaaaatctctctgaccctagcagggcagagccacggaaacgcaaggaaagccttgatcagcttgggcctagtccaaagcggagcacggagaaacggaacagagagcaggaaaataaatatatagaggagctggcagagctgatttttgcaaactttaacgacattgacaacttaaactttaaacctgacaaatgtgcaattttgaaggagactgtgaagcaaattcgccagatcaaagaacatgaaaaaacagcagctgcaaatgaggatgaagttcagaaggctgacgtgtcctcaacaggccaaagtgtcatagacaaggatgcacttggaccaatgatgcttgaggccttggacgggttcttttttgtggtgaaccgtgaagggaatgtggtgtttgtttctgagaatgtgacccaatatctcagatacaaccaggaagaactgatgaatactagtgtgtacagcattttgcatgtgggagatcacagcgagttcatcaaaaacctgctgccaaagtctttagtaaatggggtgcctaggcgaaatagccatacctttaactgtcgtatgctggtgaagccaatgatggaatgcgaagaggaaaggcacgatggtcaggaaacacatcagaaatacgaaagtatgcagtgctttgctgtatcccaaccaaagtcaattaaagaagaaggtgaagatttccagtcttgtttgatttgtgtggccagaagagttccagtgaaagagaggcctgtgcctcccccatctgagagcttcacaacgcgtcaggactttcaaggtaaaataacatctctagacacaaccagtatgagggccctaatgagaccaggatgggaggacatggtgcggcgttgcatccagagatttcattcccagcatgatggagaaatatcttacagcagaagacatcaccaagaagttctcaggcaggggcatgcgaccagtcctttctaccgcttttccttgtcggatggtacgactgttgtggcccaaacaaagagcaggctcatgcgttcacagactaataatgaacctccgcttgtgttatctctacatgtgcttcagagagaacagaatgtttgtggattgaatcaggacttggctgggcaagcaatgggaaagacattaaatccagttcagtccagcagtccagctcatcaagcaatgtacggtgggaacccaggtcaggatacgaccataagtagcaatatgaattatgccataagtggcccaaaggaacaaatgggcttggcgactggcaggtttgttggttcaggtggaatgaaccatatctcaagtttgcaagcaaccactcctcagggtaataactatgcacttaaaatgaatagcccatcacatggaagtcctggcatgggccagggtcagcctaattctatgctttcaccaagacatcgtgtcagcccaggagtggcaggaagtcctcggattgcaccgagtccgttttcccctgcaggaagtttgcattcaccagttagtgtttgcagtagcacaggaaatagccatagttacaccaacagctctcttaatgcacttcaggctctcagtgagggtcaaggccctcttgcccccccattgtcctctcctgatctgaaaggtggaaatcttcagcattcgcctggcaacatgaaccctcctcagcttagaaagatggggagcatagactctaaagaatcttttggtctgtatgaggaacagcctgaaagtgcaactggacagggggagtccggctgccattcaaatgagcagaaagactgcggtgaaaacctgtcaagtgttgttgacaaaacagaaggccaaagcagattgcttgatggcaaaggtcagcaaaaactgttgaaactgctcaccaccaaatctgaccagatggagccatccacgctacctagtaatactttgggagacatgaacaaagactccttgtcaaattttgcatcaaatagtatgtctgcctcagcacatggaacctcactgaaagagaagcataaaattttgcacagactccttcaggacagtagttctcctgttgacttggcaaagcttacagcagaggccaccgggaaagagctgagccaggagtccaatagcacaggccctggttcagaggtcactataaagcaggaaccagtcagccccaagaaaaaagagcatgcactacttcgctacttattagataaggatgatactacagataatgtagcagatatcacacccaaactagagcgagcagataacaaggtggaccctagcagctgtccaaaattatcggctgtcaaagcagagaaggaggagccaaactttggacacactgaccagccggggtctgattttgataacctggatgaaattctggatgacctgcaaaacagccagctaagccagcttttctccgacacacggcatgatggcaactcagcggataaacaagccatcatgaatgacctgatgcaactggctggtgaaaacagcacaggtctccctgcctgggcccaaaagcagagaatgctccggatgcagcagaacaatggtttcaatagccaactggccgcacagctgggacgcttgccaaaccagaatttaccactggacattcatttccaaagccaagcaagtgcaggatcttttgcacaaatgaggagcagcggtccgtacactactgtgcctcagtctggagtgattaataaccaggcaatgatgggcagtcaaggcaatgtccgtaacagcagcccaggtattgtaggagtgaatggccctaggccaccattaaagccaggagactggggctctcaggcatctgctgtgagaccagcatgcccgaccacaagcactgctatgaacaggcatgacatgtcccgcagtccaactgccagcattcctatgaggccgggcagccaagtgtgccctaggcaagtgcttcagtcagcagtaatgaatatggggtcttctgagctcgatatgaacattagcggtcctcagtacacccagcagcaagcaccccctaaccaaaccgcaccctggcctaaccgtattttgactattgagcaaccctccttcaacaatcaaaaccggcagccatttggcagtcctgcggatgatttgatttgtcagccaattgtgtccgagtctcctgcagacgatgggaaccttctggaccagctttatatggccttgagaaactttgacggactagaagagattgacagagcccttggaatcccagagatggttagccagggtcaggctgttgaacaagaatcctttggaagtcctgaatcaaacttaatgatggagcaaaagccgcctgtctataaccatgcatatgcaaatcagggccagatggctcagaatagttaccaaccaatgcaggatcctggtttcaaccctatgggccagcgtccaagctatggaatcttgcgtatgcaaaacaggcctgggctacgaccgacaggaatggtgcagaaccagccaaaccagctgagactccaactgcagcaccgccttcaagcgcagaaccggcagcaattaatgaacccaataaataatgtctcaaacatgaatctggcaatgagacctggagtaccagggcagctgagagagcaggggcccatcaatgcacagatgttggcacagaggcagagagagatattgagccaacacctacgccaaaagcaacttcagcagcagcagcaacaacaacaacaacaacaacaacagcagcagcagcagcagcaacaacaacagcagcagcagcaacaacaacaacaacagcagcaacacagggccatgatgatgagaagccaaggcctggctatgccccctaacatggtgggctctggaggcattcctgcatcaataaacagcccacggatcccacaaggcagtacgcagcagtttccatttcctccgaactacggtactggaattccatccccgccacctttcaccagtcctttttccccagtgccccccagccctgggtcacagtcgctctctcacagttctttgcatggctcccagatgaatctggctaaccaagggatcatggggagcatgggaggacagtatgggcctgtcatgaatccccaaatgcagcacaatgccttccagtttgccaactcaggaatgagtcaacagtcagacccaggattcactggagcaacaaccccacaaagtccaatcatgtcacctagaatgggccatatccagagttctatgatgcagcagtcacaggccaatcctgcgtaccagtcagagctgaatggatgggcccaggggaatcctgctggaaacagcatgttttcacaacagtcccctccacattttgggcaacaaagtggcaccagcatgtacaacagtaacaacatgaacatcagtgtgtcaatggcagccaatgggaatggcatgaataacatgaaccagatgaccgggcaaatcaacatgacctcagtgacctctgtgcctacatcagggttatcttcaatgggcccagagcagaaatactgctgacccgaaagattacaaaatgtttttaatctgctgaccatgttcactggccggaagagtggtgtggtcagaagagctcagccagctctgtagtgttcttagagactggcccggcagccagccaaaaaaagaaaaaaaaaaaaaaaaaaaaaaaaaaaa

SEQ ID NO: 116 - DNA, 634 bp, Xenopus laevis
gggggtcgtttcctggccctcagcaaagccccggcgctttcagacatgtcagtttccgtgttttcggtagtttctcggttcttagatgaatatgtcagctccactccgcagcggctcaagctactggacgcttacttgctctacatcctgctgaccggcgctttgcagttcttgtactgcctgctggttgggaccttccctttcaactccttcttgtccggcttcatatcctccgtgggctcattcatccttgccgtgtgtttaaggatccagataaatccacagaacaaaagcgacttccaggggatatcaccagagagagcttttgcagactttctctttgccaacactattttacacttggttgtcgttaattttattggttgatttctttcccaataaaagcgaaagtttccagtcgttccattctgttgagataaagaagactctttccatgttactggacacgcacagattcattcctacccctttgtttctatgatgtctcataaagggttggtcaggccaaacagtagaacctgagccactgcaaccagtctgtgttttgtcaggaaaaactggcaataaagtgtacatttccgaccaaaaaaaaaaaaaaaaaaaaaaaaaaaaa

SEQ ID NO: 117 - DNA, 4165 bp, Xenopus laevis
ccaacatgaggttccgactccccgctttagcccttgcgctggaaataataattattattttatttggaatattcgtcaaatacgacaccagcgagcacaatgatcctcaacacaattccacggctggttacagccaattcctcagcctgtatcctttattccaggatgtccatgtcatgatcttcgttgggttcggtttcctgatgacatttctaaagagatatgggttcagcagtgtcggggtcaatatgctcattgctgcactgggacttcagtggggaatattaatgcaaggattctggcaccttcatcatgggaaaattcaagtcgatatattaaaaatgatcaatgctgatttcagtaccgcgactgtcctgatctcattcggtgctgtcctggggaagacaagtccagtccaaatgctaatcatggcaattatagaaattgctatatttgctggcaatgagcatctggctggaatgctgggggcgagtgacatcggcgcttccatgaccattcatacctttggagcttactttggcctggcggctgcagtggttttataccgtccttcgctgaaaaatggccatgaaaacgaagggtctgtttatcactcggatttgtttgctatgatcggaacccttttcctctggatgttttggccaagcttcaattctgccattgccgatcctggcatgaaccaacaaatggccattattaacacttacttttccttggctgccagcgtgctcactgcctatgctatttccagctttgttgaacacaaaggcaaattggatatggttcatatccaaaatgccaccttagctgggggagtggcagtcggtacatgcgctgatatgaacatcgggccttttggagccatgatcattggattcacagctggaatcatttcaacccttggcttcaaattcctgactccattcttggcaacaaagttgcgtatacaagatacatgtggcgtgcacaacttgcatggtttgcccggcatcttgggaggacttgcagggatagtgtctgcagcagtcggagctaaagaaggctgcaccccagctatgcaagctgcttcattggctgcaacactgggaatctctattgttggaggagctctcacaggatttatccttaagttgcctttcttgggccagccacctgaccaaaattgctatgatgattccatttattgggaggtccccctagaagaacctgaacaggaaaaccaacaccagaatgaacatgggaaaattttagaagcataaacatgatatacagtatattctgcccccacccacaatcttttttatttttttactaataaacgccaacattcacttaacctcctttctaataaattgtaaatggcatttcaacaactgcacaaaccatttgacccataagtagtgatgagtgatttttttttggcaggctttgccatctgcaaatgttttcgcaacaaaaaattcacaacaacaaataagttgctgcaaataaaaatgcctatgacttaaatgctttttgagtgaaaaataatttgagaaaaagccccttgactttaatgcatttggagtgaaaaattgttgtgtgaaaaaaaaaaggccacctattgacaatgctgtttgcaaatttttcctcattgtagcaaaaaatttggcgaagcggaaaagcacagattcgcacattactaccaataagcaacatgttatataattgaagggtagatctgctggggctccactgaaggcacacacttgcagttttctatatggtaaatagactttattaatgtatttggcacaccatcatcactcatggcacaccatttaaattaatggaagccatggtacgggcatggtcaatcttctcacatgcttcaataaagcctactatatctgttcttctgtgccatttatatagacactgctggtctgggccaggttggggtgactgcagtcaataatctgatacctacagtatctagaaaattaagtcaaaggcaactggacatttggagtttttcctgaaaacgtttcaccactccaagtggcttcttcagttgaactcaattcagcggtgagacattttcaagaaaaactctaaaatgtccagttacagtaattctactagatactgtatatcatgacctggataaatgagactcttcatagacaacctaatacctacctactcctatgtacaaacaaccctcacaccaagcctacagcttcattttcagctataaaaaatacaacagcaacaacaaaagcgttttagtgcaacatcagtgggtacagtacctgcaagtttatggagaagcgttcttccaaaaaagaatacttcagtatctgtgtttcagtccaagtgacaaagctgtgagtgctggggtataatgttgttcgaacgtggtaatgaaaatgagtttatttgccaccttttgccaattttcctagtctaaactaaggatcaactttcacatcctcttagaggaggctgatgccacacaaggagcttggtaggagtcatccatatcttgtggatcactgaccattgcttcatgttggtgacaatgggaagtaacccttgagtggaacaatatgtaagctgataacattgaataaaagaggaataaaataattaatagtggtatctttgttctaagggaaaaaagttttaaatcaaagatttaagaatatgatgttaagccaccaatttatatttgtgtttgattttattcttgttgcaactgcaatatttgactgtttttttaatagtaaaatgtatctctactgaacaatagaaagcagtgttggactgggataccaggggggccatcaaaatagaccataggcccactttccaaactctttgcactcacgttacctgttattcctcttgtgtctttactttacatcgaatgaccatgaaatcgggcaaatgttgcagatgggcccactgggagttttcctcgtatcccggtggaccagtccgacactgatagatgatattttatgaatcaataatatgctatggctttatccttaatatttgtgctaactatacaacattcattgtgtctgatatttggcagcagtttgaactgcatagtggggcatgtttttttgtgcatattaaaattaaaatttacttttttttacaaattgtgaatttttttatttttgaaaagttgagtatgagaatatttttttttctattgattaaaaagtaacaatttggatttttgtcatatgaaaaatcttataatgaacgtgttcaggaaattcttggctgtttgttaatatgttttacaaatattttaaatgaggaataaattggttccaataagtaaagtaaagtaaagtaaagacctcaaactataattgtttggagatttttgtcagatttttaaaataaatctgcccaacaatataacatttgaaaaagtaaattaacagcaagtctgagaatttattgaggtcattttttaaaggtcatttttgaccagtgttgcaatttgactcagtatgtttcaaattaaaaattcctcattataggagccatgaaagggccctcacagtgatcattggatttttatggtccttccaatacagaaatcaagggttggacagtgaccacatacaatgcagtttttcactgggaattctcagtaaagtgggtctttatttcaggctgatctacactgctgttaccttagtagagtagccaacttcttcattgaccaatagccataatggctcatttaatccttttggaggggtagacagggcaacaaagagataacttgcttgtttaataaataatttgcaactctagctaaactaattatattcatacctttgcctgatatttgttgaactgatatgttaaatattatactagagaaccctggtttgatgcctatagcagaactaatgtctatgaacagatctctgtaccttggacacagtaggattttgtgatttaaacttgaataattcctaaaaaaaaacatagtgctaaatgtaaataaatatatcatttatagatacaatgttccacttttttatgaatttggatttgtgtatgcttttcaatatagagaataaatatatgtacctataaaaaaaaaaaaaaaaaaaaaaaaaaaaaa

SEQ ID NO: 118 - DNA, 3051 bp, Xenopus laevis
cggagaaattgttctcgctgcaactcgcacttctcacgtggatataaatcttcggtcgcagaatgtcctctccaacatccacaccaagccgcaggaggaacaaacgtgggcgaggcagtaaccctccaactcctcatggagaggaagtgcagtctcctccgtcacagagacgacggacagaagattccacatcaattggtgaactactgcccatgccaacctctccttcaggtgacgttcagagccccagtggacaagagctcttgttttctagccctgtaccatcaagacattcagcccatcaaagtgagcttgatcttagttctcctctgacttatggcacccctagctcaagggttgagggtaccccaagaagtggtatccgagggacacctgctagacagagacctgacttgggatcagcacggaaagttaagcaagtggatttacattcagaccagcctgctgcagaggagctagttacgagtgagcaatctttgggacagaagttggtgatctggggaactgatgtcaatgtagccacttgcaaagaaaagtttcagcgttttgttcagcgtttcattgatccttcagccaaagaagaggataatgtaggactggatctgaatgagcctatatatatgcagcgacttgaagagataaatgtggtaggtgatccatttctcaacattgactgtgaccatctcagaaactttgaccaggatctttacaggcagctagtgtgctacccacaggaagtcattccaacatttgatatggctgctaatgagattttctttgagcggtatcctgactccattttggagcaccagattcaagttcgaccctataatgcattgaaaactaggaatatgagaagcctaaatcctgaagatattgatcaacttatcacaattagtggcatggttatcagaacttcacaaatcatccctgagatgcaggaagccttttttaaatgtcaagtgtgtgccttcactactcgggtggagattgatcgtggtcggattgcagagccatcggtctgcaaacactgtaacaccacacacagcatggctcttattcacaatcgctctatgttttcagacaagcaaatgattaaactgcaagagtctccagaagatatgcctgctggtcagacccctcatacaactatcctctatggtcataatgacttggtggataaggtacagcctggtgatagagtgaatgtcacaggtatttatagagctgttccaattcgagttaaccctagagttcgaaatgtgaagtctgtttacaaaactcacatcgatgtaattcattaccgaaaaactgattcaaagcggttgcatggtattgatgaagacactgaacagaagttgttcactgaagaaagggttgcaatgttaaaggaactggcagcaaagccagacatctatgagaggcttgctgcagctcttgcaccaagtatatatgagcatgaagatataaaaaagggaattttacttcagttgtttggtgggacacggaaggacttcagccataccggaaggggcaaattccgagctgaagtaaacatacttttgtgtggtgatccaggaacgagtaaatctcagcttctccaatatgtatttaatctggtacctagaggtcagtacacctctggaaagggatccagtgcagttgggttaaccgcatacgtgatgaaggacccagaaacgaggcagttggtactgcagacaggagcattggttcttagtgacaatggtatttgctgcattgatgaatttgacaaaatgaatgagagcactagatctgtgctacatgaagtaatggaacagcaaaccctctccattgctaaggctggaattatctgtcagctgaatgcacgtacatctgttttggctgctgcaaacccggtagagtcacaatggaaccccaagaaaaccactatagaaaatattcagctcccacatacactcttatcaaggtttgatctaatatttttgatgctggatccacaagatgaagcatatgatcgccgcttagcccaccaccttgtggctttgtactaccagagtgaggagcagatgaaagaagagcacttggacatggcagtattaaaggattatattgcatatgctcgcacttatgtgaatccaagacttagtgaagaagcaagccaggctctaatagaggcctatgtcagcatgcggaaaatcggcagtggtcgtggcatggtttctgcctatcccaggcagcttgagtctttaatacgccgagcagaagctcatgcgaaagtacgcttttctaacaaggtggaaacaattgatgtagaagaggccaaacgtcttcatcgtgaggctttgaaacagtctgccactgatcccagaactggcattgttgatatatctattcttacaacaggaatgagtgcaactgctcgaaaacgtaaagaggaattggctcaggttttaaagaagctcatccagtccaagggcaaaactccagcgttaaaataccagcagctctttgaggatctacgtgggcagtctgatgcagccattacaaaagacatgtttgatgaagctttgcatgcccttgcggatgacgactacttaacagtgacaggaaagactgtaaggttgctgtaaagagatactgtcctgtattttctaaatgttgaatatgcatctgtataatatccgcttatgaaagtggcttggatgaaatctaaaactgcagtgtacattttgtaatgtcctatttttgatgactcttttactttttagtaaatgttatattgaaaagtgctttgccacaagttctcccgtgtaactgttttaggctactatgcagagtgcgaagggaaaattgtttttggatggacaaaaaaaactgcagtgcattccagcataattgtgtaattatggtaatttcaccaaaataacttgaatccaatgatgtacattaaaataagcaagagcaacaatgttgtatattgcacctgttacataataaataaaagtttggtgcaaaaaaaaaaaaacg

SEQ ID NO: 119 - DNA, 1880 bp, Xenopus laevis
ctactgactggagccgcattactctgatcctgccgccgctctaatcggatcctgccgcgctgaccctgctcccgccatcctccgcgcctcttcactgtctcactcttgctgttcctgctctccgcgatggcggctgctgatctacgggacgagctgagctgctccatctgtctgagcatttatactgatccagtgatgctgccatgtggccataactactgccggggctgcattgggaaacatgggaccacccagaagggatctggggcttattcctgccctgaatgcagacaggagtttaaagagcgccctgccctgcagagaaaccgaaccctgggcaacatagcagagcgattctgtccaactgagatagagcagaaggcggctgggatcttctgcacctactgtgtcctctcttctgtacctgctgctaagtcctgtctcctgtgtgaggcttctctgtgtgagacccacctgaaggtgcacagcaagtcagcagaacatgtactgacccaacccatcgcttcctttattgggagaaaatgttctgtacatcacaaagttctggagtattactgctgcgaggatggtgcctgtatctgtgtgtcctgcctgtctaacccaaaacacaggggccaccaagtggagctgctgagtgaggcctctgagaagaagaaagagaaactgagggaagttctggagaaactgaggccagagagagtggagactgtgaaagcagcccagaagctagaggagcgcaggagagaagtggcagaaaaagcagccggtgagacagagagagtcactgccctgtttagagacatcagggaacagctggaaaccctagagaatagactcctgggtgacctctccagccagaaagaaaagatcacactcacactcactgatctgatggagcagctggaaataaagaagaacatattgtccaggaagatccgtcacattgaggagctgtgcaacatggcagatccattcaccatcccacacgaatgggaattagatgaggtcagcgagagagatgatataaaggtccctactgtagtgtatctgaatgtggatcgcatctcagagacattactcgctcgcttaacaggggattgtgaatgggttaaagggaaaggtctacgggctggaggctacagacctgttactggatttaaacacggctgggaaccagtgtatgtttatcacgggcaccggaaatcggcttccttcacactaacagaccaacattacccaccaacctctgagagatttatgtattatgctcaggttttaagcaccaggagtttctcctcggggcgacactactgggaagtggagggcagtaagttagggggctgggcagtaggggtggcctataccagtatagagagggggtcgggggagtctggaatggggaatgacaagtcctggtgtctgtacaaaagggatactaataatatctatacagtgagacatgatcgtagagacacagatttgccctatgccccttcctgctggagaatcaggatctcgctgaactatgagaccggacgtctgtccttttatgagctgagtgagccaatcagacacttacacaccttcactgtccccttcagtgagtcccttaatgccgcatttagggtatggggaaatggagccgtagtgaaaatcattagttagagccctgcccacttgtagggttaccaggtaaagttcagtatatactggaacatcagaggagtcatctaaagatacaaaacccatgaggaggtagaaacacggaggacctccgtcctcttggtatgttttattttcctcaatctatgattgttttatgcaacaaataaattcatgtgtaggactgccggaattcc

SEQ ID NO: 120 - DNA, 2894 bp, Xenopus laevis
gttgcctgtggtaaagacgtagcgaagggcggtaccacaggaggtggcgggtggggggagactgaggagcaacagctgctaatggactggcctggctcctcctaccgggttgcgggttagtgtgaggcgggcggcaggggacaaggagcggagagaaactctgggcctgactgggacttattggcacccgacgttgtctggaccgggatctcctctcactccccgggacccgtatgttccattgccagcagggctgcagcactagcgactaatggagcacatacaaggtgcctggaagactctgagcaatggctttgggtttaaggagtctgtgtttgaggggagcagctgtatgtcccccaccattgggcaccagtttggataccagcgtcgggcatcagatgatggcaaactcagcgacacgtccaagactagcagcaccatgcgtgtgtacctacccaacaagcagaggacagtggttaatgtgaggagtgggatgagtttacacgactgtctcatgaaatccctgaaggtccgagggctccaacccgaatgctgcgcagttttccgactgattcaggatcctaaggggaagttgcgcttggattggaatacagacgccatgtcactagttggagcggagctgcaggtggattttctcgatcacgttcctctcacaacacataattttgtgcgcaaaacgtttctaaaactggcgttttgcgatatctgccagaagtttcttttaaacggctttcgctgccagacgtgcggctacaagttccacgagcattgcagtaccaaggtgcccaccatgtgcgtcgactggagcaacatccgacagctgctattatttcccaatccaaacaatatagaagggggcagccatacgttaccttcgctgacaatgaggcgaatgcgagaatctgtccggattccagtcagctcccagcagagatattcaactcctcacccgttctccttcagtacccccagtcctgtttctgagtgctccctatcccagagacagagatccacttccacccccaatgtgcacatggttagtaccacaatggccgtggacagccgagtgattgaggatgcgctgcggagtcacagtgagtcagggagccccaataatctgagtcctacaggttggtccaatgctaaagcgcccgcccccacgcacagagagaaggcggcttcatccactggccaagaaaagaacaaaatacggccccgtgggcagagagactccagttattactgggaaatagaggccagtgaggttatgctctcttcaaggattggatcgggctccttcggaacagtatacaaaggaaaatggcacggggacgtggcggtgaaaatcctgaaggtgacggatccgactccagagcaacttcaggctttcaggaatgaggttgcggtactccggaaaacgcggcacgtgaatatcctgctgttcatggggtacatgaccaaagacaatctggccatcgtcactcagtggtgtgaggggagcagtctgtactatcacctccatgtcctcgacaccaagttccagatgtttcagctcatcgacatcgccaggcaaacggcacaagggatggattacctccatgcaaagaacattatccaccgggacatgaaatcaaacaatatctttctccatgagggattaactgtgaaaattggagactttggcttggccacggtaaagaccaggtggagcggatcccagcaggtggagcagctgactggctccatactttggatggccccagaagtgatccgcatgcaggacaataaccccttcagcttccagtcagacgtctattcctatgggattgtgttatatgagctgatgaccggggagctgccatactcacacattagggacagggaccagatcatatttctggttggacgaggaggggtggtgcccgaccttagtaaactctacaagaactgccccaaagcaatgaagagacttgttgcagattctatcaagaaactcagggacgagcgacccctcttcccccagatcctttcatccattgagctgttacaacactcgttacccaaaattaacagaagtgcttcggaaccctcgttacaccgcgccgcccacacagaggacatcagttcatgtgcattgacttcaacccgactgccagttttctgatgagactgtcgccctcgctctgactctctcaccatcaccaagttctcaccgagctccgagtactttatccaaacaggactttattcagcatttattctacatgtcagccagtggttccagggccccaggatattgccgctgagaccctcccgcatcactgttatcatgtgacaccccaatatagactgcggccctccagccagaggaggaaccatccagctcctattgcaactttgcagttatttcactcccggagctttaaggtttgaagtattgttcttttaccccaaataaactctggaataattcctcctgtgatggagcagttttggggtggggaaacgagtggcgggtcctttatattgttcttttaccccaaataaactgggatattctccctgtgatagagcagcgtgggggtggaatggagtgggggggttcttcatagacttgatttacagctgatggacattgggcacagcaggggttccctcctgcagtttcacagtgattctgtgcaggacccgccggtggccacatataccaatgaaaaggtcccagacgtgcactataaggtgaatgggagtgataccgtttgttattggtttgggttttaattggttcttttattgctactcagaagctgcagctattggctgatttgtcataaattaaatgtgtcttacattttaaaaaaaaaaaaaaa

SEQ ID NO: 121 - DNA, 1692 bp, Xenopus laevis
ctcaccacagcagcttttctcttatactggaagggtgtctcttgctacaatgtcaaactattctataaaacagtcagctaagaataactattccagctcaagttctggaggatttaggggtggtcatggtggaaatgaatatttttgcggtgtaggaggcgagggtgactttggtggtatgggtggctttggagcttgtggtgcaggctatggtggtggtgcaggctatggtggtggtgctggtggtgcaggctatggtggtggtgctggtggtggtggtgcaggctatggcggtggttttggtggtggttctggtgcaggctatggtggtggttttggaggtggtgcaggtggaggctatggtggtggttttggtggtggcttcggtggtggtgcaggtggaatggacatcttctctaccaatgaaaagcaaaccatgcagaatctcaatgaccgcttggcttcctacctggacaaagtccatgcactggagacagcaaatactgaacttgaacgcaagattaaggagtggtatgaaaagcaacggccagggagctcaagtggagatggggcaaaggactactccaaatattatactatgattaatgacctaaaaaatcagatcattgcagcatccatagaaaatgcaaaatttcttctgcagaatgacaatgccaggctggccgctgatgactttaaaatgaaatttgaaaatgaacagtacatgcggcagacagtggaggctgatatcaatggtctgcgtagagtcatggatgatcttaccctgtccaagtctgacttggaatctcagcttgagagtctcagcgaggaactggcctatcttaagaagaatcatgaagacgaacttaaaggcatgcaagtgacccaggttggtcaagttaatgtagaaatgaatgctgcaccaagttctgacttgaccaaaatactcaatgatatgaggagtcagtatgaagatctagccaagaggaaccgtgcagcagcagaggaacaattcaacagaatgagtactgacctgaaaaatacactttcccaagggattgaacaacagaaggagagtaagtcggaattgacagaactcaaaagaacactccaatctctggaaattgaacttcagtcacagcttgccatgaaaaaatctctggagatgacactggctgaagtggagggctctttctgtatgaagctgtcccgtttacaggagatgattgtcaacgtagaggagcagatagcacgactcaaaggagagtcagagtgccagactgcagagtaccaacagctcttggacatcaagacaaggctggagaatgaaattgagacatatcgcaggctcctggatggagatctgagcaaacccaaaagtggtggaggcacttctactaatacaggttctacatccagcaaagggtcaacgagaactgtaaaaaggagggaaattattgaagaggtcgtggatggaaaagttgtgtcaaccaaggtcgtagatatgtaaagagaaggtgcagaacaagtgcacgcttgttactactataaatgcttattaaattctccagggaaggaaatgtcaaaaccttaatctgcttgtagccatacttatattcttagttgcatagttattttgcattcttcttgttgtatcatccacacaataaacatttttctgatgcaagctat

SEQ ID NO: 122 - DNA, 2820 bp, Xenopus laevis
ttccttcttcccaactcgaggggtttcataaagtggagcaagctgcttggattcccttgtgtctgctccccaagagagttcatattttattggagacagtatcaaggtgggatctatattttctgaattttcatacccttctgtcacggtttccaagaaattaccacttttatgagagtctgggctgaatccctttagagagtcactgtagccactgtcctgcgacactgaagtatctggtggtcagccttcttctttgccccagccgtcattgagtgatgggcagcaaaattctctaagagatttgccatctcttgtttctttcttctgtatgcatttacatattcaaactgacgtttattagtctagcgtgaggcctcctgtattgtatttgtgctgtcggggcaaagtttctgcactccgggactaattctgttgctcctgcaagttcttcagagcagcctgtgattttctttgttgggatctctttaaagcaagcagtttggcagctcctctggacttaatgtctgtattttatcccattcactgcactgattatctgagatctgctgagatgacagaagtaataatgaacactcagtccatggatgaaattggattaagccctcgcaaagattcctatcagattttcccagacccttcagatttcgagagatgctgcaagctgaaagaccgactcccctccattgtagtagaacccacagaaggcgacgtggagagcggggagctaaggtggcccccagaagagtttgtggtagatgaagacaaagaaggcacttgtgatcaaacaaagaaagagaacgagcagtaacggagatgttgccaccagttgtaaacctattgtcgcttggagcaagagggatcgacaaatggcttgactaagacttggttagggatgcttttgttaacgatgacaaattcaaagatgcacctgcaagattttttctttttcattctgtttttcttgcgagaaataaagcaaccttcgatgtgacgagaagcggggaaatttgagaaatgctcgctgtttttttccttcattacttagagatgttgtctgagctctttttcagatgtttgaggcagcagtaaaattcaagtaggttctaatgatgacaaatcgaggatcaaatgatgattgaacacctataggggcgcggtactgattccctccaaaaggcaaaaactccatctctccaaacgttttgtcccccatttgaatgaaagtaggaaatttaaaggctctttggggggggggctgatattgatagtcatttcagttcttcctccacccagtttgaaaatccaggaactatttgtcatatctttaagttgaacaaggaatatgtcatcacttaaattggggggatgtctacaatcatcatatcctactgtacaagaccataaagccgtgacatcattttcatatcccccccccccacatggattattccctaaaaacacatcaatttctttatatcgagcttccggccctaacgaagaatttgcctcctggtgttcactacttttacaccatatgtgcccgcgaaacctccattgtccgctatttagtaccatagttgtgcccatagagtgcacttatattgtcagagacctttttacagttctgcaccttttattttttgtgtgtatgtgtgcgaaaggattgtgaacagatcttctgccagtaaaatccaacaaaatgtaattataaacatttacttaatggtgatgactctggggaagaagaataatgagtaagatcgggatcatcaaaggatagttgaggcccattatccatgttcacaagcagaaccagcctttcccttaattgtttctctaaaccttcctgtgctgaaaggactttaatgccctttgttaggtgctgacagaacatatgataaacacatctgtctcgcttttcccgtccccgctgctgaacgccacttctgtaatccaacccccgtgcagcttttttcactgcttcatatcaaacgtccgattaacgatttctctttgcggtttgcacggaacctatcgatatgcaaaatacctcagtttccaatgctggcgggcgagaagggaagatggtttgggtgcacatatatcacctggttcgttcatgttcggtctgtcgagtcctgaagctatagcaataacttgtgtatgctttgaaactctcaaaaacacactgtaaagcttatatcatatgcgtatatatcttgctagtaacacgtggaatgttcttatggtctcgtccgcatctccaaatggttagtgtcaactttaaaaagaaagtctctagaccaatgtgtgtgtttagtacatctgttcctgttaacggtctaccaacggggtgtaactgtgatccgtcaacagagtctgggccctgcacggcctccatgatggacaataaatgtgctctcattgctaacattgacacaattgtgactttgtagggatagaagataatgtgtcgtgcttttttggggctcaagtggggggaagcgtctgctgacgatcaggaaccttgtatctgcgtccttttgagagtattgtatatttccagttgttactaatgtatccgtgaacaaaagcactccagtactctctgttgtattataatatatatatatatttctgtaattttttgaggctcagggagaagctagcttttttttttttttttgttttgtttttttccaaactacttttgtcactgtgacagttgtaaataaaagtttgaaattgctttccaaaaaaaaaaaaaaaaaaaaaaaaaaaaaaaaaaaaaaaaaa

SEQ ID NO: 123 - DNA, 3392 bp, Xenopus laevis
caaacccgagggcgcctctggcgagtgtgcagcgaacagagaggagggggagccgacaagtatgtccggcggagagtgacggcccaggcaggcagcagtacccaatggaccccaaagaccttttaaagccctccagtggatcaccggcagtgaggggctcacctcattacaatgacaagccggggaatgtgattgaattctttggaaattataggggaggagttagtgtgagcgtctctgcatcttgcccaacctcaactgcttcacagtcaaacactaggcagcagcagcattttcaaaaacagctgactgcgactggggactcaactaatggattgaataataatgtgcctcagccagatttatctaaagcagtctcgctctcaatgggactctacatgggggagtcagacacaaaagtgatgagcagtgatatcgcctttccatcccaagagcaaattggtatctccacaggagaaactgattttagtctcttggaggagagcattgccaacttgcaggctaagtcattggccccagataaactcatagagatctcagaggatcctgggggttttaaatgtgacatatctgcccaaccaaggccttccatgggtcaagggggcagcaatgggagcagctctaccaatctgttccccaaagaccaatgcacctttgacctactacgggacctgggtatctccccagactcacccctggacggtaaatcaaatccttggctagacccactttttgacgagcaggaagcatttaacctgttgtccccactgggcaccggtgatccttttttcatgaaatctgaagtactgagcgagggtagcaaacctctcagcctcgaggatggcacacagagactcggtgatcatgccaaggacatgctgttgcccagtgcagacctgccaatttctcaagtcaagacagaaaaggaggactacattgagctatgtacacctggcgtggtgaagcaggaaaaatttggtcctgtgtattgtgtaggcaatttttctggatctggcttatttggtaacaaatcttcagctatttctgtccatggcgtcagcacttcaggtgggcagatgtaccactatgacttgaacactgccaccatctcgcaacaggatgttaagccagtctttaatcttggctcacctgggactagcattgcagaaggctggaataggtgccatggatctgggaacgacactgccgcttctccagggaatgtcaattttccaaacagatctgttttttcaaatggctattcaagccccggaataagatctgatgcaagtccttctccatccacctcttctaccagcacggggcctccacccaagctctgtttggtgtgctctgacgaggcttctgggtgccactatggagtactgacttgtggcagctgtaaagttttctttaagagagcagttgaaggtcagcataactatctttgcgctggacggaatgactgcattattgataaaataagaaggaagaactgccctgcttgtcgctaccggaaatgtcttcaagctggaatgaatctagaagctcggaagacaaagaagaaaatcaaaggaattcagcaatctactacagctacagcacgggagtctcctgaaacttctatgacgaggaccttggtacctgcttctgtggcacaactcacacctaccctgatctcattactggaggttattgagccagaagtgttatattctggatacgacagctccataccagacacaaccaggaggcttatgtcgtctctcaacatgcttggtgggcgccaagtggtgtctgctgtcagatgggcaaaggcaattccaggtttcagaaacttgcacctggatgaccaaatgacccttcttcagtactcatggatgtttttgatggtgtttgcacttggatggcgatcttacaaacaaaccaatggaagtattctgtattttgcgccagatctcgtcattactgaggacaggatgcacctaccctttatgcaagagagatgtcaggagatgttgaagattgcaggtgaaatgtccagtcttcaaatttcatatgatgaatatctctgcatgaaagtcttgttgctcatgtgcacaattccaaaggaaggcctgaagagccacgctctgtttgaggaaattcgtatgacatacattaaagagctgggaaaagccatagtaaagcgggaaggaaattccagtcaaaactggcagcgcttttaccaactgacaaagctattggactctatgcatgaggtggctgagaatctactggccttttgcttcctttccttcctggataaatcaatgagcatcgaatttccggatatgttgtcagaaatcatcagcaatcagataccaaaatattcatctggaaacctcaaaaaactgttatttcatcaaaagtgactgccttaatggaacatatatatataaatatatctattagtataaaaaaaaagttgccttaaggaaagctaaagtaaaaaaaatatatatatatcgcttttaatgtataaaaaaagaagagagcctaaagaaatcagctgttcttattgtccttgcaacggtgttccttttgtaattatgcactacagttcttgtggtttacagagggccaagttttaaactacgggaaattcctcatttcaagagtgagatgggctgaataagagggggttgaataagagtctgcattgtgaacattctgcttgtaattcttgcattaggatgggtttattttgctagatctatttttttttttctttaaagtgttttttttttaggtgacattaaaggggaattattatgacttcggttttttttttttatgttatttatgaagcaaatctaaatcccaacattctttttagctccccctagaaatgcagcacaatccaacaagggggcattaatatctctaaaacaaatgtttttattggttgtaatcgcaaaacgtcttggattttctttataaatgacatattaaaaatgaaagaaatcagggtttcccccttaggaaaggttgatttatgcatgtaaccagaggaaagtttacaagcgtctatcagaaaagggaagttgtgccttttttttttttaagctactgtttggatctagcagtttcctctcaatgttttaccaccaacgggcaaactggcttcctcctatttttattttccatacgatttaggatttctttttgttttggggtttttttttgttgtaatttttaaaaacaactgttgtacagatatggccttaggggaatatgtttccagacaggggcagctttgagctttcctaacacctttataaaatagtccgtaacagaaaaactaaaatagacaaaaaaaaaaaaaaaaa

SEQ ID NO: 124 - DNA, 1558 bp, Xenopus laevis
aagaaatctgcatcagttagaaaagagcgattagccagtgagcgagatgaaccccgtgcaacaaccggcccagcacaggtctccggcctccctcctgcacctgcctcaccctaaacgcgcccaggaggctccagacatgggactttattgtgacaacttcatgttctctcagcagaacctgcacccgagccagagggcccccaacttcagcatcgggggggaattcaccccgccagctaatccttacctgtggctggggggtcctgggatgaataacgcccccaattacagccctgcccctgctccttacattccctctgctttcagcgccccccagcggcacttcatggccaactctgcagcctttggtggagccgatttgggttggatgtcggcggcttcccaggaggagcttctcaagatggtgagacccccttactcgtactctgccctcatcgccatggccatccagaatgcctcagacaagagactcaccctgagccagatctaccagtatgtggcagaaaacttccctttctacaagaagagcaaagcaggctggcagaactccatcaggcacaacctgtccctcaatgactgcttcaagaagatgccaagggatgagaatgatccaggaaaaggaaactactggactctggactccaactgcgagaagatgtttgacaatggcaatttccgccgcaagaggaagcccaaatccgagtccaacaacgctaaaatcgccaagagggatgaggatcacttgaacccaaaaggcaaagaaagtccacccatgattactccctcctcctcccccgaggttctgtctcccacaggccatagcaagagcccctctcccccaactgtcacctacaccccctgtctgaccaacttcattggcagcatgactgccgtggactcagctacaatgaacagacagagtcccctggggcttctcaatgaattgtctcagaggaacatcacaggcttgagcagcttcatttcgggctccgcagttgatcagagctcagagcatcaggacaacagtctgttctacaacagaagcccctactacactaatcagaagcagccacacttccttcagcagctccacccacagcagccccctttgtaccagggaaggtattgacgtgtagttctacatgacatttgcagactgagactggatatgatgattgcagggcccgggactgaaatctcagaatgacatttcccatgggaggaaaaaaaaaaaatatgagactactgcaaataccaccgtccatagctggctgaggatgctgggaattgtagttcacaagtgtagggtatcagggacgtctgtagcaaggagattctttttcttgttctcaaaatgatgcagatttattttataagacaaaagaaatagcttttttttttgcattgtgaacgtgtaacctgtaaatataaatatattgtcattcatatgttgtgacttgtgtgtcacatggttctttatttataatatttttttataataaaaaaaagaaaatcatcaaaaaaaaaaaaaaaaaaa

SEQ ID NO: 125 - DNA, 1591 bp, Xenopus laevis
ggcacgaggatcagtcgccgggtaggaactgtacaaccagccagtgacctgcaatcgcaagcgcttcttctccaaccccaactctcctcatcatgagcagccctgatggtggttacgccagcgacgatcagaatcagggaaagtgctcagtgccaataatgatgactggactcgggcagtgccagtgggccgaacccatgacttctctcggggaggggaaactgaagagcgatgcgggatctgccaattctaggagcaaagccgaggctcggatccgccggcctatgaatgccttcatggtgtgggcaaaggacgagcgcaagagactggcacagcagaaccccgacctgcacaacgccgagctcagcaagatgcttggcaagtcgtggaagtctctgactctggcagagaagcgcccctttgtggaggaagcagagaggctgagggtgcagcacatgcaggaccaccccaactacaagtacagaccccgcaggaggaaacaggtgaagaggatgaagagggcagaaaacggcttcatgcacatggcagaggcgcaggagagcgcagtgctgggcgcagatggaaggatgtgtctagagaacttcagcctgggttatcatgagcagacttactcccacggccaggttcctcagagcagccactacagggaaccccaagcagtggctccccattatgacggttacagtttgcccactcctgagagctctcctctggatttggcagaagcagatcccgtgttcttcacatctccagcccaggacgagtgccagatgatgccctacagctacaatggcagctaccctcaccagcagaactccatgttggtaagacagatgccacaaactgagcaaatgggtcaagtcagtccagttcagggtatgatggcatgtcagagctccccacacatgtactatggacagatgtacttgccaggctctgccaggcatcaccagctccaccaagctgggcagccctccccaccccctgaggctcagcagatgggcagagcagatcacatccaaccggctgacatgttggcagaggtggacaggactgaattcgagcagtatctgagctatgtggccaagtcagacctgggtatgcattatcatgcgcaggaatcggtggtgcctactgcagacaatgggcccatttcttctgtcctttccgatgccagtactgctgtatattactgcaactaccccagtgcctgagagactgacaccgtgccctatagattctgcagtattcacacacaccccagtattgagaaggacgggctctgtgtcttatcttattgactctctaatttatgtaacttattttacatacaactggccagtaaagtaagaaatgaaatattgtctaccaggtaactggctccagacttactgatcaaaatgagtttgatctcgattattttcattgaatgcaatgtgaaacggtgtgattattgtgtacgtggtacactgcttttatttttgcgcttttaaataatttttatacattgttttattttattttgcacttttataaataaacattcaaatataaaaaaaaaaaaaaaaaa

SEQ ID NO: 126 - DNA, 1805 bp, Xenopus laevis
gtcagccagaaagtaaccagaaggatctgctactcagaggcagcttagaggaatcagcctttcttaggaagatttgcagcctgctctggctctgttgttgcggaatataccatcctgcccctgcagtttagccttgtagagatttgttaagctctttttttctgctagggggaaaaaaacctgtacttttgaagagcagaagcatcgatttggaagtatttttctttgaaataacactgttgaaaaacggagcacgtgaactactgatcagataaagaacttttcttggaaataatcaccgtgattgaaaaacctcaagggtcatcaatgcacctgcacagtcctcccctgatggctgatggaagcttctctctgtccggacatctgctcaggagcccaggaggtaacccgtcgaggctgcacagtatagaggccatcttagggtttgccaaagaggatagtgtcctgggctcatttcagtctgaggtcagtccaagaaatgccaaagaggtggacaagaggagctctagacattgtctccacaaaatgacagaagagattcatccccaacaggaacatttagaagatggccagactggtggctatggagatccatattcagcaaagacctcaagcgagtgcctgagcccaggcttgtccacctcaaacagtgacaataaactctctgacgatgaacaacagcccaagaagaaacacaggaggaaccggacaacattcacaacttaccaactgcacgagctggagagggcattcgagaagtcccactaccctgacgtgtacagcagagaagagctggctatgaaagtcaatttgcctgaagtcagggtgcaggtatggtttcagaacaggagagccaaatggaggaggcaagagaaactagaggtgacctccatgaaacttcaagattccccgatgctttcatttaaccggtctcctcaaccttctgccatgagtgccctcagcagtagtcttcctctggactcctggctcaccccaccgttatccaatagcacagccctgcagagtttaccagggttcgtcaccacaccgacaagccttccaggcagttacaccccaccgccatttataaaccctgcatccatgggtcatgctctccaacctttaggagccatgggtccacctcctccttaccagtgtggggccaactttgtagacaagtatccactggaagaaatagaccccagaaataacagcatagcctctctgaggatgaaagcaaaggaacacatccagtctttcggcaagccttggcaaaccatatgaatacggcacagatcagccaccatgccctgggaggacattctaacaaatcagtggacttcataggggagacactttttctctaaacatgaacattatgggccaatttcctagaatgttctggctttaatactgtggagtttgccagtgtttttgacagcacaaaccacacgattggactaacgtattatctcatgtatacaaatgtaaattataggtataagtatttactaggagatttaaagactcaataacaattttccagttatttttttttatatttatttacaaacttgaaactaggtctctgtgactatctctaggtcaggggtccccaaacttttttttaactgtgagccacattcaaatctaaataaagttggagatcaacacaaaaaaaaaaaaaaaaaaaaaaaaaaaaaaaaaaaaaaaaaaaaaaaaaaaaaaaaaaaaaaaaaaaaaaaaaaaaaaaaaaaaaaaaaaaaaaaaaaaaaaaaaaaaaa

SEQ ID NO: 127 - DNA, 2502 bp, Xenopus laevis
gattcaggagctttcctggagtctcgcttgatagtcacctgcaagttgggcagattaaaccgagaatggaggaaaactgggatactgaaattgaaactgaaaaaccaacttatgtaccgaatttcagtaccttggagaccgaaaatacagataattacagtgcctactctaacaatgatatcaacaatcaaaattatgattctgaaagaagttttggaaaccgaggaggttatcggtctgaaaggagtaggcctagtaattttaacagaggtagtcgaactgaaaggggaagaggacgagggtttggtactaatcgaaatgataattattcttctgagagagatgtgtttggagatgatgagagggatcaacgcagagggtttccaggcagaggtggatataatggcaatgaagatggacagaaacctaatgcctttcgaggaagaggtgggttcagaaatgagaatgaacagcgtcgaggctttggagaaagaggaggatttagaagcgagaatggacagcgaaactttgataacagaggagattttggtaattctggtgaagaagaggatcgtccacgttcttatgggagaggtggttttaacaactctgatactggtggaagaggacgaagaggtggccgaggtggtggaagccagtatggtggatacaaaggaagaaatgaagaagttggtgtagaatctggaaaaagtcaagaagaaggaaatgaaaaagatgaaaaaccaaaaaaggtgacctatattcctccgcctccacctgatggtgaagataatatattccggcaataccagtctggaatcaattttgataaatatgatgagattcttgttgatgtgacaggaaaggatgttcctcctgccatactgacttttgaagaagctaacctttgtgaaacactaagaagaaatgttgctagagctggatatgtaaagctaacaccagtgcagaaacacagcatccctattataatggctggtcgtgatttaatggcttgcgcacagactggttctggtaaaactgctgcttttcttttgccaattctcagttatatgatgaatgaaggaattacagctagtcagtatttacaacttcaggaaccagaagccataattattgcccctaccagagaacttattaaccagatatatctcgatgctcgaaaattttcatatggaacctgcgtgcgtccagtagttgtatatggtggtatacaacctgtacatgcaatgagggacgttgaaaaagggtgcaatatactttgtgcaacccctggaagattgctggacatagtaagcaaagaaaaaattggcttaagtaagctaagatatctagttctggatgaagcggatcgcatgttggatatgggatttgccccggaaatagaaaaattaatgacaaagccaggaatgccaacaaaagaaaagcgacaaacactaatgttcagtgctacctatcctgaggaaattcggaggttggcttcgaattatttgaaatctgaacatttgtttgttgtggtcggattagttggaggagcttgtagtgatgtggcacaaacagttcttgaaatgcgagaaaatggaaagatggaaaagctacttgaaattctgaaaagctcagagaaagagcgaactatgatttttgtgaatacaaaaaagaaggcagattttattgctggttacctttgtcaagagaaattttcatcaacaagcattcacggtgatagagaacaataccaaagagagagtgctctctgggatttcagaactggaaagtgtactgttattgtctgcacagcagttgctgccagaggcttggatattgaaaatgttcaacacgtgataaattatgacgttcctaaggaagttgatgagtacgtccatagaattggtcgtaccggtcgctgtggtaacaccggaaaggcaacatcatttttcaatgttcaggatgaccatgtgattgctcgtccccttgtgaaaattcttaccgatgctcatcaagaagtccctgcttggttagaagaaattgcctttgggggccatggagctttgaatagcttttatgcagcggactctatgggcgaacaggccggaggaaatgccgtcactactccttcattcgcacaagaagaagaggctagctgggattaaatagtagaatcaaattgcagaattcaaatattgttaaaatgtttaaaaagaaatcttgttttataacatcttttccaagagctgaaatgacgaaaaaactccttatgtgagaattatcaatcgcaagcagagcaagttatttgatttagtttgaacctttaagagaatgtgtttacattcaacttggccatcatttatttcattaaaacctttattgtttaactgcaactgaaagtttgacttgtataattattaaaccaagttttgtttgctttttcttccaaaacaagcaccaataaacccacatcattctgaaccgaaaaaaaaaaaaaaa

SEQ ID NO: 128 - DNA, 2912 bp, Xenopus laevis
aaaaaagagatcctagaactaggcgaattcggcacgaggctttagcttccggactaatagccaatcaagtgctgcttgtgcgagtgatccccttggttttcgcgccgcaatttagtaggatactagtattgcactccgagaggaatggcagacatgtcgcaaatgcgagtgaccgattttttctctcaaagcaagcggggcaccgctgcccagaactccaaggggcggaaggtagaagccgtgttggagactcgccgcgctgtgactcgcagtagggcggcctcggttaaagccgaagagttcctgaaagccccctgtaccccggaacgcgcttctcctacagtgagccagtgtattgggcccagcagtaagaaacgaacgcgccaagattcggactcggaaccgctgcggactcaacaaagacagggcaagtctgcgaggaaaaagctaaagcttccagagggcgaacatggaggctcagtccaacagcagctttttagtccatgcaacaaagtggctttggaacatgttacacctagttcgctggggaagaagattaaggacatggtcaacgtatccttatctccaaagttcaacgaactcgcaagaaacccaactacaccagagactaagtcaccagcaaaggaaaatctcctggaacttaagtcccgtttgcagaggattcaggagctggcacaaaaagttaaccttcctgctgcatcttcagagggcaaagtcaccatcactgatttgaaagcaaggctcaagcgtgctcaagaattagatacaaagatcagagcaaaggcagagaaaacagaaacacaggccattgatcttacagagcaacctgcccaggaaagtgaaaaggccccagcctatcaacgttttcataatcttgctcaagatgcagctccagggctgactttgccatataaatataaagtgcttgcagagatgttccggagtatggacaccattgttggaatgctctttaaccggtcagagactatcacattctccaaagtgaaacaaggagttcaagacatgatgaggaagcaatttgaacaacgtaacgttggtcagataaagactgtgtatccaaatgcttacaaatatagacaggaaaagaacataccgacctttaaggatggagtaaagaaaacagactatcagcttactatagagcctttggtcgcggaaggtgatatgttaagtggacgtccacatctttcagcatcacgtttgttggagcgcaagcagctgtttcacagaagtcttaccagtatagtcaaacaacatcacagggttttcctgacatccctaaatcctcccatgcttgtgccagatgacaaattaacccgatggcatccacggtttaatgttgatgaggtgcttgatgttacgcctgctgaacttccgttgccaccacaggtggagaggcttacaactgctcaagaggtgttgtccaaagctagaggcttgattacaccaaagatggagaaggcccttgcaaacctggctctgaaaacagcagagaatgctggggaaacaaaaaatgtatctaccgaggagacaaaatccacagcaacgacttccacatcaactgcactaaaaggggtttcacagtctctgctagaacggatacgtgctaaagaggctcaaaagcttcaagccattatgacccgcagacctcagcaagaagagcgtcttctcatgatgtccaggctaccagaactggctagaatcctgcgcaatgtatttgtggcggaaaagaagccagccttgactttggaggtcacttgcagccgggttatagctagctgccgttcttccatgtctccaggtgagatggaaaaacaccttgctttgctatcagagatcctaccggactggctcagcattcatccagtcagaaaggatacttactataaactgaaccaatctatggaccttaatcttatccttgaacgactggctaagaaaacaaaggaagaagagtctctctagttttttttttttttctcatgctgtatttagtgtttttaaaaatttttaaatgtgcaatgtacagttggcagatcagtgcaaactgatagtgtcaaactggttaagctacttactgtttgaattagttggccctgtaagcaggtgctttactttacaggcaataatggtatatttcgattgtgcgtaaatctcttgcatactttaaacacaatgatggaacgatcaacggactgtagtagtgtagggtgctgatttggaagatcctgcttaaaggtcaatatggatagtcgcctattaccccatgcaaattattgcgagtgctgctggattttttcaactattaaacagtgtttcaacatgctggtagttggtgaccgtgtaatatgacacttgcagttatgtcaccaatacgagtgccttaccattaatggcagatgcaacctgagttcacctaccccccaggaaattaggttctttttctaggaagctagtgtagaaagctgtgcaaccacttttagccagcttgagttaaggctcacaaataaaccatttggttataaaggtttcctacaaagttgtgcattttgttcccccaagcagcaagcattcattgatccaattaagggtgtttaaagtagaataaaaaataagccttgtgtgttacatgtgcatacataatacatacggttatttttgtacctactgtgcttttgtagtgcttctctttttttttttttacatctcttatgtggaatctgggattgcttactttcctggaagccttaattggaactgctgttttatggaaacaagatacaaatagactgtaactaatgtcacaagacatgttttattgccctgcaatatagcctcgctttcaaatgacatgtaatttcggaattcga

SEQ ID NO: 129 - DNA, 3243 bp, Xenopus laevis
gtcagtgaacaaaatggcgtcctactgtctgcttgctagccggcttcagcaagtgctaggccatggagcccgcagataccatgtttcatccgtcctgtgccagagggccaaggtggctatgagccactttgaggccaatgagtatgtcaactatgagaagctggacaaaaacattaacatagtacgcaagcgtttggaccgccccctaactttgtctgaaaagatagtatatggtcatattgatgatccagtatctcaagaaatagtacgtgggaagacctacctccgcttgcggccagacagagtggctatgcaagatgcgactgcccagatggccatgcttcagttcattagcagcggattggccagagttgctgttccttccactatccactgcgaccacttgattgaggcgcagcttgggggagagaaagatcttaaaagagctaaggatatcaaccaggaggtatacaactttttggcaactgctgcagccaagtatggagttggtttttggaaaccaggatctggaatcatccatcagatcatcttggaaaactatgcgttccctggagtactcctgattggaacagattcccacactccaaatggtggaggcttgggtggaatctgcattggtgtgggtggtgctgatgctgtggatgttatggctggcattccttgggagctaaagtgtcccaatgtcattggtgttaagctgacagggcagttgtctggctggacctctcctaaagatgtaattctaaaggtggccggcatcctgacagttaaaggaggcacaggagccattgtagaatatcatgggcctggtgttgactctatttcctgtacaggaatggccaccatctgcaatatgggagcagagattggagccacaacatctgtttttccttacaaccaccgtatgaaaaagtatctggacaaaactgggcgatcagagattgcatcgttaacagatgagtttaagagcaatttggtacctgatgagggtttgttgaaatatgatcagctaattgaaatcaaccttgatgagctcaagccacacatcaatggtccattcacaccagacttggccaatcctgtgtgggaggtcggggctgtggcagagcagaaaggctggccattggatatcagagttggtctgattggcagctgtacaaactctagctatgaagatatggggagggcagctgctgttgccaggcaagctctggaccatggattgaagtgcaagtcgcagtttacgatcacgccaggttctgaacagatccgggcaaccatagagagagatggctatgctgcagtcttgcgtgatgtgggaggtgtggtgcttgcaaatgcctgtggaccttgcattgggcagtgggacaggaaggacattaagaaaggagagaagaacaccattgtaacatcctataaccggaatttcacaggaagaaacgatgctaaccctgaaactcacgcgtttgtaacatccccagagatagtcacagctttgtcaattgctggaactttaaaatttgatccagagagagacttcctgactggtgcagatgggaagaaattcaagttgcagcctccagatgcagatgagctccctaaatctagctttgaccctggccaggacacttatcagcacccacctaaagatgggaacagcctacaagtagaggtcagcccaacaagccagcgcttgcaactcttggaaccttttgataaatgggatgggaaagatctagagaacatgcagattctcattaaggtaaaagggaaatgtacaactgaccacatctctgcagctggaccttggttaaaatttagaggacacttggacaacatttccaacaacctccttattggtgccatcaacatagagaacaacaaggcaaactctgcaaagaactgtgttaaccaggaatatggatctgtcccagacaccgcacgctactacaaggcacatggcattaagtgggtggtgattggtgatgagaactacggtgaagggtccagcagagagcatgcagccctagaaccacggcacttaggaggcagagcgattattacaaaaagttttgccagaattcctgcagctggaccttggttaaaatttagaggacacttggacaacatttccaacaacctccttattggtgccatcaacatagagaacaacaaggcaaactctgcaaagaactgtgttaaccaggaatatggatctgtcccagacaccgcacgctactacaaggcacatggcattaagtgggtggtgattggtgatgagaactacggtgaagggtccagcagagagcatgcagccctagaaccacggcacttaggaggcagagcgattattacaaaaagttttgccagaattcatccagaggacaagatcacacttgctgggctcaaagatttggcacctggaaagccagtaaagtgcatcatcacacatcaaaatggcagccaagaaaccatcctccttaatcacacctttaacgagacccagattgagtggttccaagctggcagtgctctcaaccgcatgaaagaacttcagaaatgagggagccagtcgtctcttcactgcttttcattgttaccttattcatgggcagaagcagccctcgtgccgaattcggcacgagggctctctgaaggctttcaccaagcaggcatatctgagacaaactgggcaatagagatgtgggagcctgcagcccaggccttcagactgaacaatcccggaaccactgtgtttacggaagactgcaacgttctcctgaaattagtcatgtctggagaaaaaaccaattcgctcggacagcggttgcctcagaagggcgacgtggaaatgctatgcggagggcccccctgccaaggttttagtggcatgaaccggtttaactcaaggacctattcaaagttcaagaactccctggtggtctcatatctcagctactgtgactattacagaccaaagttcttccttttggaaaatgtccggaactttgtatcattcaaaagctctatggtgcttaagctgacactccgctgccttgtacgcatgggttaccagtgcacgtttggtgttcttcaggctggtcagtatggagtagcacagacccgcagaagagcaatcgtactcgctgctgctccaggggagaagctcccgatgttcccgaacctttgcatgtgtttgcccacgcgcttgttcactcgggg

SEQ ID NO: 130 - DNA, 2152 bp, Xenopus laevis
gtcagaagcgggccctagatcgagacatgataccaaacgacgtagacggtaaaaagattaagctggaaaagggaatgttggatattaaagaagatgaagatcttttattaaagacagagtccgggaaaataccagagttgctgaagagtgcagaagtaaaagctaccattaaactggagttgccagctggagatgagccaatggatatgagcacatcgaaaagtgatttgaagagcgaaaagagggttccttccccggatgttattgtattgtctgataatgagccgtccagcccacggatgaatggattaacaaaggttttgaaagagcccagctctgagacattcttgctcatgcggaagagtagtccaagaagagcgggagcgcatgataaagcaacttaaagaagagttacggttagaagaagctaagttggtgctcttaaagaagcttcgacaaagccagatccaaaaggagactgccccacagaaggtgacgtcccgtatttctggcacggttattcctcctcctttggtacgaggtggacagcatgcaccatccaagcagtcttcacagatagtgatgcctcctctagtacgaggagcccagcccatctctgtctctcctcaacagattcataacatcagacagcatccaagtacagggccccctccactgcttatggcaccaagggcatctgtacccagcgttcagatgcagggtcagagaatcatccagcaaggcttaatccgtgtggcaaatgttggcaacacaaatctcttagtcaacatcccacaggcatctccatcattaaaaggatcaacaggcactgcctctagcctctcaagtgccaactctaatgactctcctgccagccgacaagcagcggccaagctggccctccgcaaacagttggagaagactttgttagaaattcctcccccaaagccatcttccccagagctcaactttctgccaagtgcagctaacaacgagttcatctacctagtgggattagaggaggttgtacaaaatctgctagaatctcaaggtaaaatttctccagcatcctcatcccacgaaccttatatatgtgccaagtgcaagactgacttcactagccgctggagacaagaaaagaatggtaccatcatgtgtgacgtttgcatgtcctctaaccaaaagaaagttcttaaagctgagcacacaacccgactgaaggctgcctttgttaaggccctgcagcaggagcaggagattgaacagaggatattacaacagagctcttctcctgcacagactaaggcagcgcattctgtgcaacaccactctttgaaacagagttctaccccaatatcacgtggactatcagggaccacacgaggcatcttgcacacctttccccctacgaccaagctgtctaatgcagccactcttgctaaccgggcaggaaaagcaggagatatttctctgaacaagagtaacatgacaggaaactggaagaaaagccctattaatgcaggaggaactttagcttttgtaaacccaggcctcaccgtgcacaaatcagcagctgtggaccgtcaacgggaatacctcttggatatgattccttctcgctcaatcagccaatcatcaacatggaaataatgaataaggcccttgggtgtcacctaaatcacaggcaaaatatgtaaaccttaagattgtgtgagaaacctaaacgacagactgttttgtacactttccttcacttgtggctttttggtgaaggatattcctgtcctacaaacccccctcctctggtctgtgtgtaccacaaattcttctgtagatggcaggctaaatagcagcatctaagaagaggtgcctggggtacagggttctcagtggaggagaatacaggaagattgcaacaccatattttatcttccagatctgattggactgtccagcaacttgaaatctcacattattctcgtcatatatatttgttttatcctcaatattttttttttttttaatttttcagttcttgcaccctcaaacatttccttcagtttctctgcttcaggttaattttcccaaattaaaaagtaaccaacaacaatgtgctttatcatgccgaaacaccccgaattcgagggggggc

SEQ ID NO: 131 - DNA, 3265 bp, Xenopus laevis
ggcgatgtgagatatacaaaggagcctggctttcccggacctttcactttggatcctcggctggactgctatccgcggcacacagtcgcttcttttacgttttgttttaatgccaaatctggagatacccggacctactctcaaatctcggctctccttgtgcggccaaagggagccataggctcaggtctgccagtgtccgagctctgccgctacaaagtgtcgtgttgggacttgagagctgcatagatgcctgccgaactccaacagatttttctgctgttgcatgcctgacctgtcttaacatgcatttggtgaatttgccaaagggctcaaggactgtaatgggagcaaagtcccagtaaccaaacctccatcaccatgatgcaggaacctccagaaatgctagaagaaactgttactgtggaagaagacccaggcacccccagttcacatgtgtctgttgttacttctgacgatggaaccacaagaagaactgagaccaaggtgacaaaaatggtaaaaactgttactacaaggacagtccgacaagttccccttgggcctgatggggtgcctgtccttgatgcatcttcacctctcagtggttacacagattctattgacaggagatacatgaagaatggagaccgcttcgttacaccacaggccacatccaccttgactagatcctacaacaacagctacaatgattcctatggtgacccccatgacacacagtatcgtcccttcttggggcatgaaggatatggggatattccagataattatggcagcctgtctcgtgggattaattaccgtcctcgatatgcttacactccaggcaacaactatcggccagaggatggcagttataccctgcccatcagacgggaaaactatgttcccattgcccagccccaagttcctatcggaagtaatattgatctaaatcgatcccagcctgaacgcttccaacctgagccatatggcctagaagatgataaccgcagtctgggggcagatgatgatggctatgagcttgacccagattactccacaatgaacaggagagtgcttcctggtatgcctcttacagggagaccacacaaagcaagggcttatgatgacccgttagaagccgatctcattgaggagagagtcccttatctgcacggtggatatgcagctcctttggctcagccagaaagaggaagtctagccagcattgatcgtttgggaaaacgctctccttcaattgacagcattcgtaaagaccctagatggagagaccccgatcttcctgaggtcattgctatgcttaatcaccccattgacccagtcaagtccaatgcagcagcctatttgcagcatctttgctatgaaaatgataaaattaagaaagatgtgaggtaccttaaaggtattcctacccttgtgggcttgttagaccaccctaagcctgaggtgcatcgcaaagcttgtggagcactgcggaacatctcttatggaaaagataacgaaaacaaggtggcaataaaaaattgtgatggcattcctgccttgatccgactgctgcggaagacaaacgacatggaggtcagagagctcataacaggcactctctggaacctgtcctcatatgaacctttaaaaatggtgatcatcaaccatggcctccagaccctcaccaatgaggttatcatacctcactccggctgggagaatgaacctaatgaagactccaagccccgggatgcagagtggagcactgttttcaaaaatacttctggatgtttaaggaatgtgagctcagatggcgcagaagcacgcagacgattgcgcgagtgtgatgggctagtggatgctttgctgcatgcacttcagtctgcagtgagcaaaaaggatacagataacaagtctgtggaaaactgtgtgtgtatcatgcgaaacctctcctaccatgtccacaaggaagtccccggggctgacagatttcaggaaaatgagctcaaccagcaaggtggaatagggggtcagcagaaaaagaagaaagatgatgccggctgttttgggggtaaaaaagcaaaagaggagtggtttaaccaaggaaaaaagaatggggacacagacaagaattttgacactcttgatttgccaaaaagatcagaatcggcgaaaggttttgaacttctgtaccagccagaggtggtgcgtctctatttatctatcctgacagagagtcaaaactacaatacattggaggcggcagcaggagccctacagaacctcagtgctgggaactggacttggtcaatgtatatccgtgctactgtgcgcaaggagaggggtctgccagtgctggtggagctgcttcagtctgactctgacaaagtggtaagggctgtagcaatcgctctgaggaacctttctatggatcggcgcaacaaggatttgataggtaattacgccatgggacagctggttcgcaacttgcctggaggccaacaacgccctgcaaaaaacctggaggaagacacagtggttgctgttctgaacaccattcatgaaataatcacagacagctcagagaatgcacgatccttaatacagtcacagggaatcgaaaaacttatcacaataaataaatcaagccagtctccaagggaagtgaaagctgcctcacatgtcctgcagatggtttggagctacaaggaattacgaggttcactgcagaaggagggctggaacaaagccaatttccagactgctgtgtcaacactgccaaaaggatccaaaggaaatgggaaatctggatttgatgacagcacactaccattggtagataaaagccaagtaaacaagaaatctggaagtcgtgatatgattcccatgggagaactgggccctgatggatactccaccattgatcaccgggacaaggagcgcaaatacagatccaatgaaagcatgggggatatgtctgagaaggaacccttaaagaatgactcaaataagaaacacattacccggagtaacaggccaactgtgaatctggtggacgcacgagacactaaacctcagcctgttgactcctgggtctaatttttgcatgcatgggttaaatctgcagtgaccctttttgggaagacctttttcttattttattactttttttttttttaaataaacaatgacaaatttgaaaaaaaaaaaaaaaaaaaaaaaaaaaaaaaaaaaaaaaaaaaaaaaaaaaaaaaaaaaa

SEQ ID NO: 132 - DNA, 930 bp, Xenopus laevis
atcgaattccccggggggcattgctgcagatctctccactctccactgtaaaagatggcttctactggtctccagatccttggcatggcaatgtccatcattggctgggtgggaagtataatctcgtgtgccttgcccatgtggagggtgactgccttcattgggaacaacatagtggtggcacagatcatctgggaaggcctgtggatgaattgtattgtgcagagtactgggcagatgcagtgcaaggtctatgactccatgttggctcttgctcaggacttgcaggctgcccgtgcccttactgtcatctgtatcctggtagccctgctagccaagttcattggtattgtgggagctaagtgcaccaactgcatagaagatgagaacaccaaggcaaaagtcagcatggtatccggcattgtcttcctggtggccggtatccttatgctcatccctgtctgctggtctgcaaacagcatcatccgtgacttctacaatcccctggtggtggaggctcagaagagagaactgggggctgccctgtatatagggtgggcttcctctgccttattactcctgggtggaggcctcctgtgctgttcttgccccaagaagaatgatgctccctacccagccagatacactgccccttcatgcccaccacggagtgactacaccagcaagaactatgtctgagggcataactggctggcttggacaattgtttttgactttttatatatatacagtatgggacatatttatcagttcctccagcaaatgtgtctgaactgcatatattgtgtgtttggaggggtgaatttgtggagattgtctgtttttggacttttagctgccttcagacatttttatataattttgtaacacttaaaataaaactttctatcccaaaaaaaaaaaaaaaaa

SEQ ID NO: 133 - DNA, 2147 bp, Xenopus laevis
gtcacccagagttttgtagaatattttggagtgccaacttctgttcaatagagctgcccagctggaatgcatagatctgagtctagttactgcagagaggagactactctgtgccagggggtgaacagtacatgggtccctcctgcggatactgtgcctgaagtcagcttgatcccaagcagccctccagctccagacagtcctgcacccagccccaagcctggatatggcttcagcacctgcgaggagaagcatggggacccgcggatcaggcgccctatgaacgcattcatggtctgggccaaggatgagaggaagagactggcacagcagaaccctgacctgcacaatgctgtactgagcaagatgctgggccagtcctggaagaacctgaccagtgtagagaagcgtccatttgtggaggaggcggagaggctaagggtccagcaccttcaagatcaccccaactacaagtaccgcccgcgaaggaagaagcaggccaagaagctcaagcgcatggacccttcccctctcctgagaaatgaagggttcacaagaggtcaacccatggtcaacctttcacacttccggaacctgcaccccctgggcggctccggtgaactagagagctatgggttgcctacccctgagatgtctcctctagatgtgttggaacccagtgagccggcttttttccctcctcacatgcgggaggacactgaccctgtacccttcagaacttaccagcatgggatggattttagccaggagaagaccatgagggagatctctttgccctattccagttcaccatcacacatgggaagcttcctcaggactcccacaccatcagctttttactataaagctcatggaggttcaccagtctgcactcctcttggccagctctcccctccacctgaggccccagccctggatgccatggatcacctaaatcaggctgagctgtggggcgactttgaccgaaacgagtttgaccagtatctgaatatgagcagaactcagaggccaggatactccttccccatgtccaagctgggggcccccaggactataccctgtgaggagaacagccttatttctgctctctctgatgccagcactgctatgtactataccccctgtattactggctagagtgggacacttcagggactaggggtcagtgccttgtgcaatagtggggcagctgcaaacctgggcacagcaatgtatccaattttcactttgtaatgggaaagggggggcacatttgaaatcccatccgaaaagttccagtcccacatagtcacacacattaaagggactatctactcattataggacttttcatcaatccattagcattcatctacatgaagctgtataactataacaatcaccccaatgttcaataaatctttggtcccaacaaggtttattgttcttttcccacatcctcatttttcctgctaaaaacatctcactcatgctgtctgtcagctgcatatcctaaatcaatgactagcccttgtacactcaacccaacagccccgaatgcacagcaggactcagttgtttgcagcaggaaagatcaggctgaggcctgagggaggtcactaataaatccttaaatagttttttatgtgcccagaacattccttttacttacatataagtagcagtggggtgacacacacctcggcattcagcttcctgcaaaacataaacgccagggttcaatgtcctaaatgataacactagtatgacagctcctactgtaatgtttaaatctacattatgctcagtgcacaaggggtttcatcttaacctcttacctgcaaatatctttgattgcgctactccatgttttgccacatacagtgcagcattggtcaaatagtatacctaaaatattcactcaatgatgccagcagtcaggtacagcaggtaagtaattatgggatccaccttcacccgtccacatgaccaacataatcctgaatccccattcactccgggcagagacctgaggaagaagagcagagaggcagtcccccactctgtagtgtaatgacctggagtcacatgttaattgtgttttatatttttttgtatttttacataaagaaaatttgactttcttg

SEQ ID NO: 134 - DNA, 4040 bp, Xenopus laevis
ggcacgagagcctgatatatgtataagagtctcccagaaaggggaaagagacattagtaggacatgaagtcagcactgcaagctctgtacttctaactgccggctaagctggtggcacttggatacgagagaggagaaaaccctgcatttcacctctgcattgactactgcaccatcgaccagagcctgcagagaaagagagagagagcgtagactctaaagttcctttccgctgtcatcccgtcccatatccacgacgcagaaaattgaacatgaggtggaacatgttgctgctcctgatactcactcatgcatcaatattgctaacttcagcactggaagaaaactcagagaacagcaagacattgaaagtgacaataggaagccatcctgccagacctgtgctaacagggaccctcacaattccttgtcacatcaggtaccagtcaccatctgaggtcatcagtgctgggcgtcaagcagtgctggcaacacctagaataaaatggggcttcatctcccaagggaaggaggtggaaatactagtggcaaggggccgcaaagttaaaatcagtgaaggctaccgtacccgtgccttgatgccacactatgctgagtcagtcaacgatgccactttaatcttgaacagcctaattactaacgactcagggatctaccgttgctatgtacaacatggtatagaagatgactacgacatgctggaggtcaaagtaaaaggggttgtgttcctgtatcgggaaggaactgcacgctacgcttatactttctctatggcacaggaagcgtgcaacagaataaaggccaccattgccacaccagaacagcttttggctgcttatcatagtggttatgagcaatgtgatgctggatggatttcagaccagactgtcagataccccatccagatcccaagagatggttgctatggtgacatggatggtttccctggagtccggaattacggtgtgctggatccagatgacatgtatgatgtatactgctatgtggaagaactgaatggtgaagtatttttgggttcgacgcctaataagtttaccctgcaagaagcaagggactactgcaaaaggttgggaacaaacattgcaaccacagggcaactctatgctgcatggaaccaggggtttgatctctgtagccctgggtggctctcagatggaagtgtgagatatccaattgtcactccaagagaaagatgtgggggcaatgcttctggcgtcaaaactatatttatgttccgtaatcagactggattcccagactccatggccaaatatgatgtttactgcttcagagataagagccggattacaccacaaaatctggatgatggtcaacctgctccagttgagaaggtccagaatattattactttaacagaaagctttaagaagctaatgtttcctgaaggcattgccgaaaatgaagctcagggctctgtggacaccataccactaaacaaaacaaagatggcagacagtcaacagatactagaagagctaagggaaaccattacgaaggagcaagaatcaactctccaagagtcaacaccaactataaagagttccaccagcaactcatatctatcttattcccctgtggttatggaacaagaacaagaagatgacaaggaagcagaaacagcaaaagaagatgctagtttcacccaaaaaacaccagagaccaaggttgcgttcatcccacaaaacaaatctgttttcactctccaagagacgacaagcagcatgttggaggaaagtgttgccgttcctacgcagcaggttccaggtgactccaccaccgaagtagttcttgtaaatgtagatgcagaaagcgattacttttatgacaatatcaccaatttgccagatgaatttggctctgaggagtcagaaacattaaaccaaacttttaataccactacccaatcaccacagagaagtcttgaaactgaccaattaatgaataaccatggtgaaaaggaaaacgaggaagtttataatatctcagtgaccactaataagcaatctgaagcttcttctaatccagtttacccaacacaagctgcttatgttaccagtttagctggtagtggcatagaaaacaaagatggtggtaatcctctagtacattccacaggcgatatagatgatacaagttctggagggtttcctaatttagttacacctggtgaattttctattagtagctctggtgccggagcacaggtttttgaagcatccggacatggagataatttgtttacagaagatctgaacatcagtccaaaaccctttgtgagtttattaaaagaacttgttaccagcgagttcccagtatcgacaaaacctcccatgtattctgtggacactagactagatcgatctaaagatgcacacacaaatttgttcacaacacaagtagattcatcactggaaaccagcggtcagagcagctcgcaagccactttggaggaagcaagtggggacggttctggttccttatgggctgagtcaagtggacaaaccaacggcacacaagatgcatccactaacatagtcgagcactcagggaacccaaccagccatcctgagataaaacaaattacacaaagtgtggcccattctacaaagttctttggaaagaacccagttgataaaaaggatgaaaacctagagactgcaactgtacaaatctctcaactaaaaagttcttctgttatctctacggaaaggcaagaaaatatcaacgagaatagcctttcttcaacagccttaccaaactccaattcaagggaagttatgactgtatcaccagtctattatgttcctctcaggcatactttatccccatcacctactgatgggtctgaagattctaccactcatattctggagaaaacagccaacccaaatgtgtctatgagtgcaaccagcccaccacctgcaatgccaacagagagagcaattctgggagcctcaataaatttgtcagatgtctgctacccaaacccttgtggaaatggagggacttgcattgacgaagaagatggagacttcctctgcctgtgtttgccaggctatactgggaaaatctgtgaaataaatgtagagacgtgtttgggcgactgggatgccttccagggattctgctacaaacatttccatgcaagacgaagctgggaagaggcagagaacttctgtcgagaggctggaggacacctaaccagtatcatgacccctgaagagcaagcatttctcagcaacaagtacaatgactatcaatggactgggctgaatgacaggaccatagaaggggacttccagtggtcagatgggaaccccctgctctttgagaactgggcccatgggcagccagacagttatttcctctctggagagaactgtgtggtgatggtgggacacaatgagggcaaatggagtgatgtcccatgtaattaccacctcccatttgtctgcaagatgggactagtgtcctgtggtcctcctccagatgtccccaatgccaccatgtacggcaggccaaaatcaacctatcagatcaattcggtgattggatacggttgcaaggatggtttccttcagaggaactcaccaatcattaggtgccaagcagatggtttttgggaggaaccccaactaagctgcatccccaatgcctcatttcagtaatcagatcgtttgagatcctgtgtccttccaatctttgctctaatatgtttcccacctggccataagtagcctttctgaaaatatctccaggacccaacagctgcaggatgcggctccagaccaacaatgggttcaaaacacaattagtggcaccataagggggcggaggttatttctgtggacaaattaatgtatagactgcagccagatcaaacgcaacctaactgcttcacttccactttactgcagcaaagacatgctcaacagcccccaataaatggaaacgtgccaacaataaaaaaaaaaaaa

SEQ ID NO: 135 - DNA, 1683 bp, Xenopus laevis
atcgaattccccgggggggaagggtggagcgggcaggagagggaaagggagggggagacggagagccggcacagtttcttcccggacatggctttcaggaggaggaaaagttatccgctcttcagccaggagtttatcattcacaaccatgcagatatcggcttcttcttcgtgctgtgcgtgctcatcgggcttatgtttgaggtcactgcgaagactgccttcatcttcatcttgcctcagtataacagcagcattcagacgctagatggcgagatattgtattatcattacggggtgaaagatttggtcaccatcctgttctacgtggtcatcgccatcattctgcacgccatcgtacaagagtacattctcgacaaaataaataaacgtcttcatctgtccaaagtgaagcagagcaggtttaatgaatcggggcagctagcggcctttcatctcgcctccatgttttggtgcctctatgtatctgctacggaaggctatttatcttatccaaaaaccctgtgggaaagttaccctcacgtttacctgcccttccaagtaaagtttttctacctgtgtcagctggcttactggctacatgcactgcctgagttatacttccagaaggtgaaaaaggaggaagttccgcgtcagttgcagtatattgttctctatctgctccatatagcaggagcttacctgctcaatttaactcgcttggggctgatcctgctgctcctgcagtcagtggcagaattcctcttccacatcgcccgcctcttctacttcaccgacgagaacaatcaaaggctatttaatgcctggggcgtagtctttgtcattactcgcctttttaccctcaccctctctgttctgaccatcggatttggtcttgcacgagccgaggttcatacgttcaacccggacaaagggaacctcaatactcttctcttcaggatggtggtgttactgctgatgtgcgtatcccagacctggatgatgtggaggttcatccacttccagttgcgtcggtggcgtgagtgctgtaaagaacaagcggccaggaagagatcggtagcagtagccatgatgaagcagcaagccaaagtcattaaaagggaatctggttatcacgaaaatggagttgtgaaagccgagaatggatccaccccccgacagaagaaaatcaaatctccttaacggccaaacgaagtgataccagaatttggaggagaccgcgagcctcggactgaatcctccacatttctgcctgcccagtgggcaaataacaagtgcctttttggaaccctcactaggaactatttactatataattaaacaccgcaatcaacttgccttgtccccacccactcctgagtcaggtccaatcaagcctcggggctggggtgggggtatgtacattcccgtttattgagtgaattattctagtctgtgttgctattctcatcatacagagcatcagttgcaccaatccaaatctccggaacctcctcattggcctctgtaggtccacatctcttcagtgtgactaatggctgaccctgcgaggaggcaaatcatggatggcagttgcttttagccattaaactcgtggttgagttttgggtaaaatcctgtgactgaagaattgcgttgcggttacaaaaaaaaaaaaaaaaa

SEQ ID NO: 136 - DNA, 5419 bp, Xenopus laevis
gggtttttttattatgattttacctttctcttcccctgtgaatgaaatacagcattgtgattagtaatcccactctggtgacttgatttaagttggttttggaggatatcccagagttctgtttgttaatcttgctactcctgtgtcagacaccgctggatacagagcaaagagccctgagagctgcctgcacttttctcatacttgtcttgctttttcaccttgtctggggagcacgccaatggataccaagctcatatgtctgttttttcttttctctgtgccttccctagcagtgggaaaccagacagggcgcatcaaggtggtcttcacacccagcatctgcaaagtgacctgcaccaagcaccactgtcagaacagctgtgagaagggaaataccaccacgcttataagtgagaacggtcattctgctgacacactcacatcaagtaactttcgagtagtgatttgtcatttaccttgtatgaatggaggccaatgtactgctcgagataaatgccattgcccacctaactttaccggcaaactatgtcagatcccagtgcaaaatggcttgcaaaaacaatacccgcatcaacagccagcccagaaagctacaggatctcaagttattcattctactcacacattgcccctcaccatgacgggtcaacaaggaattaaagttaattttcctccaaatatggtgaatatccacgtgaagcaccccccagaagcctctgtacagttccatcaagtgtccaggattgggagttcctcgtctacacagaagaaggacagccagctaggccagacacagttctcttaccacagtgcccagaaacatcagttaccccacaacacatatccccgccagcaatcaattccaaatgtgtatccaatctcaaccagaaatcaacttgggcgctgtttccaagagaccgtgggctcacagtgcggcaaaccacttccaggactttcaaagcaagatgactgttgtgggacaattggcacatcctggggctttaacaaatgcatgaaatgcccgaaaaaacaaagccattatggaccttcacaaatcatggaatgtcctcaagggtacaaacgaattaatgccacattttgtcaagatattaacgaatgtcagatgcaaggtgtctgccctaatggtgaatgtctgaataccattggcagttatagatgcaagtgcaaagtgggatatgttccagatccgtctctgtcttcttgtgttgttgataataatcctattgtgtttgaagagaaaggtccctgttacagatttttcagtccaggaaagcagtgcatgcaccctatcgcagtgcaacttagtcagcagatctgctgttgcaccgtgggaaaagcttggggccctcattgcgacaaatgccctgttcctgggacagctgcttttaaagaaatctgccctggcggtatgggctacacggtccctaacatgcctaggaatccaatacgcgttccaccacctaacagacccatcacagcacaacctccaattagaacaacacgtccaccaatcgttacaaaagaagaacctattgaagcactctctgtctccgagaaaaaccatccacacgtgcctgaaaggaaagatgaagctacagatgatgggcaggcaaatgtcccatttgaagagagacgtgtagaaggtggacaaccccagttttccccaggaatttcaaccctgaacttagatggacaattcccagttgttgtagaaaaatcatcaccacccattcctgtcgcactggccccagatgtgtctacagcaagtgctagtcaagttatcgctcctactcaagtaacagagatcaacgagtgtgctgtagatgttgatatatgtggagagggtaactgcatcaacctacctgtaggatacacatgtttatgcttcacgggatataagctgaatgagcagaagacgaaatgtgttgacatcaatgaatgcgccaaggatccccagatctgctcccatggccgatgtgaaaatacaaagggaagattcctgtgcatttgtcatgctggatatatggctaatgaacagggaactgactgtgttgatgtgaatgagtgtctgagaccacacccttgtgaggatgatgggctgtggtttaacacaatcggttctttccgttgtgaatactgtgaaaaaggattccgcaagaaccaaaggggtgactgtgaagatattaacgagtgtctgaatgaattatcttgcccacatgatagatgtgttaacagtgtgggctcctatgcttgtgttccttgtccagatggattcaatggactaaatggacagtgttttgacatcaatgaatgccaggaagatacttcactgtgtgccaatggtgactgctccaatctagagggatcctacaggtgcacatgtcaaaggggatacgatgtaacctccgatggcaaggaatgtatagatataaatgaatgccagagtggaacgttatgcttaaatgggctatgccaaaatactgaaggttcatttgtgtgctcctgccatgaaggctatcagccagctccatctggggatcaatgcaatgatattgacgaatgccaaaatacagacttgtgcagaaatggacaatgcaggaatacaaggggatcatttacttgcatatgtaatcaaggttataaagtgtctgctgatggagagcaatgcgaagacatagatgaatgccaggaagaggctgaagtctgccttggagggggaagctgccacaacactgaagggtcatatgaatgcacttgtccagatggcttccttctggtagatggtatacggtgtcaagatataaatgagtgtgagcagcctgaactttgcactcctaatggggaatgtctcaacactgagggctcataccactgcatctgtgaacaaggctttactacttcagccaatgaaagatcatgtgaagacgttgatgaatgtgctaacactacgcagtgtggcagtcaaggtatttgtgaaaatacagaaggctcctatcgctgcctctgttaccagggttatcaggactccttcgatgggcaagggtgtgtggatgtgaacgagtgtgaaatgcttaacggagtatgcggggaggcccgatgcgaaaacgtggaaggctcattcctctgtctgtgtgctgacgaaagccaggaatatgaccctatgacagggtattgccgaagccacgatgtgcatggcaccaactcctttggagagagcaacaatgatagtttgcttaatactttcagtcccagtgttacccatgataatacagaggaaaatgatgaagattacaaggactgctactataatatcattggggacaacttctgtcagaatgtgttggctgccaacgttagcaagcaagagtgttgttgtacattaggagctggatggggagataattgtgagatcttcccatgtccagtcataggttctgatgaatttacagaaatgtgtccagaaggaaaaggctacataccatcaaaggagtcgatgtatgagggcaatgatatatcttatcaagatgctgatgagtgtatgttgtttggaaaagaaatctgcaaaaatggctactgcttgaacacagagtctagttatgagtgctactgtaagcaaggcacatattatgatcctgttaagcttcagtgtatcgataataatgaatgtgaagacccaagcagctgcattgacggccaatgcataaacaacgagggatcttacagctgcttctgcacacaccccatgattcttgatgaatcaggaaaaaggtgtatccagcccaaacaagaggatacaagtgagccaactgaagacacagatgtttaccaagacttctgttggcaagagctgattgaggaatttgtgtgtagccagcctttggttggaagacgtactacttatacagaatgctgctgcttatatggagacgcatggggaatgcaatgtgctctttgccctaccaaagactcagaggactatgccgaactttgcaaccttcagtacaggccttatggacatgatgctcttatagacccttacacatctcacgattccaccccatacgagattccagaacgttatagctatgaagagctgcaggcagaagagtgcggaatcttaaatggatgtgaaaatggaagatgtgtcagagtgcaggaaggctatacatgtgattgctttgatggatatcatttggacatggccaaaatgacttgtgttgatgtcaatgaatgtaatgagctgaacagcaggatgtccctttgcaagaacgccaagtgtattaacacagagggttcctacaagtgtgtatgtctaccgggctataaaccatccgcaaagcccaactattgcacagcactgaactccgacaaagacgacagtgaacttgataagtaaaacaatccaagaaccagctacctttatttttcagcccatatactctgcactgtataaaggaatgtggactgtgtatgttacttgagaagaagatggaccagattaacttgatggtttttatgaaatgcattgagcgcagaagaatatagagctgtgatggttggcctactcctcgcagtttctgaattgttcagaccaacgcctgttttctcttggggaaaaaaacgcagaacccaagtgtagtgtctgattttgcataaatttgatggagaaatgacagagcgttatttattttttcgttattttaacctgaatggattattttctactattgctttattaacgggcattttaatagtggtggaagcatcctgtaccacttgctgactatgctgtacgttggatcctgtattacggcaaattatcgagaggacaatatttgtttttagttatttttgcaaatgttttctaggccattttctaagaacttctcacaaggttatactatacttttggaaacctaggtcagtgacttttataaatctgtgtctgtcctgtggagcaggcatccttctgttttgattcctgtctcggttgaaagaaaatgcagcaaatgttttttttaactcttctattgaatttttactgcacttcaaacctttcagactttacttgccaagtttcagagctgctggagagaaatgttaaccccttcttgtaattagacacgtttttatgtgtaaattgattatgaaaaagatatttttttttgtttcgtaacacattaaagctttatattataaacctaaagacctgggtgaatgaaaatcttcatagtcataagtcagagtgggagagctccattcaaaaatatctgtctactgcactgcagcagcaacctcccataatccactaataggcggactctctttctgtctgtccttagaccctggcttcccagcattattgatttacaga

SEQ ID NO: 137 - DNA, 3223 bp, Xenopus laevis
atctctggcaccgagtgtttgtgcgagaggaagcggctcagcctctggctgtcactggataatgatctctctggcccgtgtcaccgccgcactatgagtctccagcccgtcccgcacaggctcttgttcagcgactccgacgacgaggaggacggacacagcaccggggaggactcggcctttcaggagagcgactcgcccgtgtctcggctcagagagaagcaggaggggccgggaggatcctgggaggaggaggaaggactcggctcgtctcccattaaatcgcccggacatttctttatgtgcgactccccgacctaccgggatcttcctcccgcctcccccccgggacccgccgcctctccccccgactgtcccgggacccccccgcacaagactttccgcaaactccgcctcttcgacaccccccacacccccaagagtttattgtcaaaagctcgggggatcggctccagcgcattgaggttccgaggcgggacgctattccgagaagccgagaagcttccgaagccagagtttacgtacagcacccctcaggtcaacatcaaccccttcaccccagattctttagaaatccagtcttccaccgggctttgtcgccggagaaaaagggcacttctaaatgactcatgcggggaggacatggaaggcagtgattgtgaactggaagatgaagacgtccggccggcgaagcggatcccaataacagaaagcaacatgaagtcccgatatgcaacggaattccatgaactggagaaaatcggttccggagagttcggctcggtgtttaaatgcgtgaagaggctcgacggctgtatctacgccataaagcgatccaagaagcccatggccggctctgtggatgagcagaacgctctgagagaggtgtatgctcacgccgtgcttgggcagcacccccatgttgtgcgatattactcggcctgggcagaagatgatcacatgcttattcagaatgagtattgtaatggcgggagcttggccgacgcaatcagtgagaattacaggacgatgcaatatttcacagaaccagaattaaaggatctgctcttgcaagtggctcggggcttgaaatatattcactccatgtctctggtgcacatggacataaagccaagtaacatattcatatccaggataactgtcccaaacacaggcgtcgaggaaggggatgatgaggactgtggctctggaaatgtcgtatataaaataggtgatctcggtcacgtaacacgagtctccagtccccaagtagaagaaggcgacagtcggtttcttgccaatgaagtcctacaggaggactacacccacttggctaaagccgatatatttgccctggcgctgacagtttggtgtgcggccggagctgagccctttcctaccaacggagaccagtggcacgagatcagacagggcaagttgccccgggtgccacagttactctctcaggagtttgtggacttaatcaagcttatgatttcgcctgactcagagaaaaggccctcgtccatggccctggtcaagcattccgttctcctatccgcttctcgcaagaacgccgagcagctgcgcatcgaactcaacgccgagaagtttaagaacgcacttctgcagaaggaactgaagaaagcacaaatagccaaagcagcggcagaggaaagagccctcttccccgaccgaatagcgacccgatccacgacccagagcaaccgcacgacccgcctcatcgggaagaagatgaaccgatccgtcagcctcactatatactgacatttagtactgacatttagtacctgatagtcgcgttcaccttgttccgcttggatccattcgagcagctttacagtttcacagacactgcgttagtaggtgttaaagctccgacgtccccctggtgggaaattttggatacttccgctactgaattatggtcctggaataatggaacccgatcaataaccgtcgaaccaaatggagcggagggagtagttgaccttttaggcttttctatgtccaattaggacccgcgttgtagcctctatggtggtaaatttagtctaatcaagacacgtggtagaaggatttagggggggcgctaggaaatttttgttttttagttcccctcctctacatacactggtgtaaccccatgagctccagcaccgccccaagctctgcttcagccccgtttctattaaacatctccattactgtaatcgtttacagctttttagttccgaatttacttaatgcagaattttttcttttcttttgtaaatgtgtaaaatagatgcgccggcgtggggggagggttgtgtcgccagtttagaattaatggccgccggcgcctggaaatcgtacattttattgtgaattttattcaactttgagcactttgttggcatcgggcaatgtacgggcagagtctgtacccgcctcctgaaatttgctgctattagttagttttttttgtttctcccctccccctcttaatttctgtataatttgtagcattaaacaatcattgttgtactttgcccctccccccgatggttgtaattatgtccataactcccatgatgcaacaggaaaatttgcaccttctcaccctccccccccagcacccgttgtacagatcattcatgtcccgtgtgttccttttatttgtatgtagaaatacataatgtgactaaatgccaaaaccttgcagagcagccgcctccccttctgcaccccaaatccacctgaataggaatcttgtgccataattgcactagagaccccccaactttgtaaattctttgttcagatctctctcaattagggatgtactgaatccagaggggcggggcttaactactagcagccgctcacccattggctgattgatgaaagccgattggctgtctcagttcctgctaccattcagcaactgtcagtttattatattaacatataattaatatacgagcaactggggacgcagtttgttgccgatcaagtttgtgggttctgtacacaatgtttgttcacaagatgatctttattctatatatatatatgagaaaaacaagctgcgcctctttgtaaattcagttgtgagtttgtaatggttggttttgtctctaaaaccctgtaaataaattttcatgtgccttcctctttcttaaaaaaaaaaaaaaaa

SEQ ID NO: 138 - DNA, 1273 bp, Xenopus laevis
atcgaattccccggggtttgtgcactggtggaacttagtacagaaatatccctcttcattacaggcaggatggtcagtcatttagctttcctgaaaaacatgaagcttaagctgaggactcagaacttgtatgtgcgctgtgggctggctgagttcctgggcaccctcattttaattctgtttggctgcggttctgtggcccagatggagctgagtggttttgccaaggctcagtttctgagtgtgaatatggcatttggctttgcagtcaccgctggagcttatgtatgtgctggagtctcaggtgctcatctgaatcctgctgtgtccctcgccatgttcatactgaagaagctgagctggaagctgttcctgatctactgtttggcacagttcctcggggcttttattggagccgctctggtcttttctctgtattatgatgccttgcacgtgtacagcaatggcaactggactgtctatggcccccagtcgacagcagggatatttgcttcctacccttcagagcacctcagtgccataaacggctttacagaccaggtgattgccacggcagctctgctgatctgtatactggccatactggatgaagccaacaacgcagcacccaggggcctgcagccttttctcattggcattatggtgctgctggttgggctagcaatggggttcaactgcgggtaccccatcaatccagctcgtgaccttgcaccccgcttcttcactgctattgcaggctgggggtcagaagtcttcagtgctggaggccactggtggtgggtgccagttctaggacctttggtaggtggggtggttggtgcggtcatctatgaagtcttcatcgaattccaccatccttctcccaatcaaaagcaagaatctgaggaacccactgaaggaatcaatcgtcctcactatgagctggttcagtcctctgcttaatggtggtttcagcttctactttgccataaaactctgctttaatgcagaccaacaatctgttaaggttccttgactctgactgggaatctgcttcttgattggttatgtgtgcaaatggctatgctctcatattagcaagtcccgtgcttcaccataacatgaataattcaccccccccaatgcctataaaatctatgtaatgtgtataaaacccttgaatgaagctatttaatgtgttgacttttatttatttatatttttaaaatttgaataaagtattctccacttgtaaaaaaaaaaaaaaaaaaaa

SEQ ID NO: 139 - DNA, 1119 bp, Xenopus laevis
ggaggaggtaccgctgtggtactaggtaaatcagctactgggctccgccatcagcacccccggcatatttcactctttcccgactttcctacagctgccgccatgtttgaggctcgcttggtgcagggttccatcctgaagaaagtgttggaggccctgaaggacctgatcgatgaggcgtgctgggacattacatcgagcggcatcagcctgcagagcatggactcctcgcacgtctcgctggtccagctcactctgcgatcagacggctttgacacctaccgatgtgatcgcaatcaatctatcggcgtcaagatgagcagtatgtccaaaatcttgaagtgtgccgcaggtgaagatataattactctgagggcagaagacaatgcggatacagtcacaatggtgtttgagtctccaaatcaagagaaagtttcagactatgaaatgaagctgatggaccttgatgtggagcagctcggcattcctgagcaagagtacagctgtgtaataaagatgccatctggtgaatttgcacgcatctgccgagatctcagccagattggcgatgcagtagtcatttcttgtgcgaaggatggggtaaagttctctgcgagcggagagctgggaactggaaatgttaagctctcacagacttcaaatgtggataaagaggaggaagctgttacaatagaaatgaatgagccagtacagctcacatttgcattgcggtatctgaacttcttcaccaaagctacacccctgtccccaacagttatactcagtatgtctgcagatatcccacttgttgtggaatacaaaatcgcagatatgggtcatgtgaaatactacctggctcccaagattgaagatgaagaagcttcttaatatctgaatcagctttgttttataaaccttaaccgaacatcaaatggcgctttcacacacacacacctgccttgtgttaaacagctttggctgaacctgtaacaactggctgtacttctaggcatgtctgtagatatttttgtaaatacatcatgatttttgtaaaatctctgccctaggaggtcaataaatctttgtaataccaaaaaaaaaaaaaaaaaaaaaaaaaaa

SEQ ID NO: 140 - DNA, 1641 bp, Xenopus laevis
gagctgcgctgtgtgtgggggggggacaggggtagcgcttggcaggttgtagagataagacacacccatatcacagccgccattgtggttttgctaagcagatccagactgcagtcaccatggcctttaaggagctcacatcaagggcagtgctcctgtatgatgaatggattaaagatgctgatcctagggttgaagactggcccctcatgtcctctcctatcctacaaaccatcatcatcggcgcttacatctactttgtcacatcattgggcccaaggatcatggagaacaggaagccgtttgctctgaaggagatcatggcatgttacaacttattcatggttctattctctgtgtacatgtgctatgagtttctcatgtcgggctgggctactggatattcctttagatgtgacattgttgactactctcagtcacctcaggcgttacggatggcctggacctgctggctcttctatttttcaaagttcattgaattattagacactgttttctttgtgctgcgtaagaagaacagccagattacattcctgcacgtctatcaccactccattatgccttggacgtggtggtttggagtcaaatttgctccaggtggtttgggcacattccatgcactggtgaactgtgtggtccatgttatcatgtacagctactacggcctgtcagccttggggcctgcctaccagaagtacctgtggtggaaaaagtacatgacgtctatccaactgacccagttcttgatggttacttttcacatcggccagttcttcttcatggagaattgcccgtaccagtatcccgtcttcttgtatgtcatttggctgtacgggttcgttttcttaatcttgttcctcaacttctggttccacgcttacatcaaaggacagaggctgccgaaagccgtccaaaatggccactgcaagaacaacaacaaccaagaaaacacttggtgcaagaacaaaaaccagaaaaatggtgcattgaagagcaaaaaccattgagctcacgaataagctaagagatctctaaccgtatctgacgtggtattacttgacgatcaagcatactctgtctagtctactgtacatatatttttttccatagaaccctgtgtttttacactaagttattggggtttatatgctgtagagaacatggacctgtggggagttgttcaacatatgtacatatatttaacagaaaagagaccataaagctccttggcttgcatatttataaacacatgggtgtgcatgaaaagtaccattactttgaacaccgggacagacaatatgttaaggagacaatgtaattaaaggagcaacattcgctccaggtttcgttacccacagcaaccagccaaccgaatctttgctttctttcctacccgttgattggttgtcatgagttactaaacctagagttatatttgtgcctgttattgcatttccccccagtgttttgtaaatgtcatgaatgaagtcggacaacaataaactggactgaagacattttgcaaaagcatctgcaacatttgctgtagaacggctgcagttttgttcctgtcgtaccaaaataaaatgaaaaccttttttgcccaaaaaaaaaaaaaaa

SEQ ID NO: 141 - DNA, 505 bp, Xenopus laevis
ttcgctttcagattgaaaccaatgctcaacacacactgaatacagagagagagagagactttcgactgaagaaaacttctcatagaaccactagataactgaataaaatgaagagagcgagcgctgtgtttctaatctgtgcactggctttgtctcttctctgtgtctgtggaacaagatgttttatcactgatgaacctgctgaaccaggaagttgtctccttaatcaggtttggaaagagtgtggatcctactgcccccgagactgtcaaaacataaatgaggcagattttttttgccctgcagcgtgtaagcgaggatgcttctgtcagcccccctacatctttctgtctggtactgccgggccctgtgttctgcccagagaatgcccctaacaagctggaaatagaaaaattaaatgactccagaaattaaatgtttctagacataataaatcctgtgtatgaaaaaacaacaaaataaatacagaaaaaaaaaaaaaaaa

SEQ ID NO: 142 - DNA, 1942 bp, Xenopus laevis
gttatagctcgctattggaactcaggaatgatggctttacctacactcccatctaattggcacagccgtagcagggttcttgagcagcagatagtacggcagagagagcaagaagccagattacgtcatcagtgggatcaaaccaaccaatattttaaacagtccaatgtctgcagcagcaaacaagcacagtggagttctcggcagtcttatcaaaaaagtatgaatgcatttcaccaggagaaacagaaggaggagaagaaaaaaactttagagtatcgtcgagaacagctacggaaactgttacaagaggagcgagatttgctagaagaagagctgaaggagcttcgttgtaataaagagcacaatgtttccgatatgaggcaaaggacagaggagcttaagtctgcaagagaagagcgacagaaacagcttgcagaggaattgttatatgagcagtggaaaaagaacaatgtgaagctgcgagaagttgaatccagtctgtttaaaaagcatgtggttgatgcttggggagagcagatcacagccagaaaccaggaaaaagaagaggaagacatggagaaaaagagattagaaaatgaatatgaacttgccagaagggaagctatagagaggatgaaaagggataaagaaaaacgacaacagcaggaggaggagcttgcccgagttttgaaatggcaaatggaagagctgaagctgaaggatttagaggcaaaaaagctcaaaaaagaacaagaggatttattgaggcagcagtgggaaattgaagaacttgaggaggaaaggaggaaaatggagcagtgcagaaaaaaaacagaattaagtcacttcctgagccgacagtataatgctcagatgaaaaggcgagctcagcaggtgcaagaagagttggagatggacaagaagatcctatctgctcttataagcaaagaggatgaagatcagcacctgcaatcagccagaagggaacaagccattgcagatgttgcttggatgaaacatgtcattgaggaacagcttcatcttgagagacagcgggaagcagaacttgacacacttttcagggaagaagctaaacaagtatgggcaaaaagagaaaccgaatgggagagagagaggaatgcacggaatcggttaatgaaagaggtgttggcaggaagacagatgcagatccaggagcgcatagaaaggaaccagcttgctcaggctgaatctgtaatgaatcgtgagcggctcctcagacagctagaagaagccaggcaatttacaagccgagagaagaagcaagaggaggaacagaaaacagcccgcaggacagaactagaagcacagattgctgagcagctcttaaagggaaaggaagccattgtacagcaggaggaggaggagaaagagtttaaacttgcagaggatttggagaatgacttactgcaacaggaggcagagattatgacccagcgaggataccagaagaagacttacagtcgccccagaactgcttggtcttgagaaggacaatgaaagtgccggctgttgccctcacataaactacaatccctacgctgaggctgccagctgtctccattttcatttatttattactatggaaatatgcttgtgtgtcgtagagagagagagaggatacagactattcattcccaccggggagccttgtatacatgaacttattcttagtttaaacacaacatgtttcagaccaacctgctcctttctagcagatccagataaaccattattagcttaaacagaagtctatgtcaatctgaagatactgtctgtttactctacttatacagtgtgtgcaatgggactcacacttcagccccgatgttctgcttcttcaataaaatattattcacatttgtaccattaaaaaaaaaaaaaaaaaaaaaaaaaaaaa

SEQ ID NO: 143 - DNA, 2145 bp, Xenopus laevis
aatacgcagagtggacaaaaggagaacgaaagtggaaggcgagagctgaccgaagacgcacagacaggggcttgtaggaatacactgtacaatacacggcgttacgttggagaggctgcgtgtccctgacgtgaataagagcaggacaagtctgtactactccccgtgacattactgtacctctgacgagagacgcccagtatccgccgtctggtgactcttcctgggatccacacgcacatagcgccagagcaacaggagcctgccgggaactcgcggccatgtccacctccccgctgcccaggaagggatactatacccaggaggtgaataagactgtgtgggaggtgaaggagaggtacagagagctgctggctgtgggctcaggagcctatggtattgtttgctcatctcttgacactaggactggaacaaaggtagctatcaagaaactgtaccgtccttttcaatcggaactctttgcaaaacgagcttatagagaactgaggcttttgaagcacatgcagcatgaaaacgtaattggattattggatgtttttactccagacacaaatttggataaattcaatgatttttatttggtgatgccattcatgggtacagaccttggcaagataatgaaacatgaaaagctatcagaagaccgaatccagtttctggtttaccagatcctcagggggctaaagtacattcattcagctggcataatccacagggatttaaaacctggaaatcttgcagtaaatgaagactgtgaattaaagattctggattttggcctggcaagacacacagacagtgaaatgactggttatgtggtgaccagatggtacagagccccagaggtgatactcaattggatgcactacactcagacagtggatatctggtcggttggctgtatcatggcagagatgtacaccgggaggccactgttcaagggaaatgaccatctgaatcagctaacagaaatcatgaaaattactgggacaccaactcaggattttgtccagaagctccagagtactgatgctaaaaactatatcaagagtctccctaaagtgcagaagaaagactttggatcattgctaagatatgcaaaccctcttgctgtaaatatccttgagaagatgttggtgctggatgcagagaagaggataactgccacagaggctttagcacatgcttactttgagcagttccatgatattgatgacgagactgaagcagaaccctatgatgattcatttgacaatgtaaatcttcccctggaggaatggaaacggctcacacacgaggagctcactagctttgagccattggtggccgattcaaaggaaacttcggtataatgtgtcacaaggctgcaaacaaatgtgagctgtaactgttcaaaactggactttaactggatgtaaactgtatggtctttattgtaggaaccatttgtgttgctcccccaacatggatctagtgcctttttgtatatcctttgtaggggtgtttgatttgccagttcgttatcttactgctgcaaataatgtgctattattgtgaagaaatggtgtacaaaatgaaatgattcattccattgtgacgattcagtgtaagtgtagaattttgcttttgcctttgtatgagtggtctgactgtactagcacactatatattcccacaaaccttagcactaggtagatgtgaacttattctgcctaaaatactaatttctgttagggttgtattctttctgctctgctgatatggtttcagtatgtagtgtagcttaaatccccacattaggaataaaaatggtacataaatcatagaaagctaatattttttaagtctatggaatattgccattgctgctaaccagcctttaatgtactatattaagtgcccatttcaaattcacattatttgtttaaatatttttgttccagtattttgtcatctgcttcactcttacactacctgacataattctctggacccattggttcatttagcactacattaaaataaagcattaagtcaaaatgtaaatgaataggcattactgccctgtaatacgaaatggtgcctataaacattgcttgccatcaaaaaaaaaaaaaaaaaaaa

SEQ ID NO: 144 - DNA, 1061 bp, Xenopus laevis
ctccgcgcagagaggaacctcagtacagaaacttatcctgtaaatcatggctcaacccggagatgttctgccaacctacgacatgtctgattcccagacctcaaagctcataaggaagtcaaaggagtctccatttgtgccaataggaatggccggatttgctgcagtggtagcctttgggctattcaaactgaagagcagagggaacaccaagatgtctgtccatctgattcacatgcgtgttgcagcccagggattcgttgtaggagccatgacatgtggggtcctttactccatgtataaggagtacttggccaagccatcggagcattgaggaatcatgtctgtccagacttcacagatattggataaaccccatattggggctgtgttttattttctttatgttgcatatcccaccttctctgtttaatggtctacctgcagtgtattgtgggaccccacagctgaaccataagatttctttcttttttttattgaatccagctctgtaatttatacagtgaaataaactagggatgcaccgaatccaccattttggattcggccgaaccaccaaattcgacgaataccgaaccaaattggtggaaggcgaaaaaaatgttacttccttattttgtgacaaaaagtcaagcgatttccctccctgcccctaatttgcatatgtaaattggggtttggatttggctcagccaggcagaaggattcggccgaatccttctgaaaaaggccgaatcccgaaccgaagacttactggaccttaagcttctatgtactgcctaggaactgtatttattttattttaagtgtctgtaaatacaattttaggttgatgttcctacagtgatgcagttggttgtgagatcgtccaatcgctgattaatatcggttgtgttctgttgaagcattactcctccacatataaaacacctagaaatccccctccaccaatgtttttttatttctcacaaatattggtacagaaacatgggtttttgtgatattaaaaatatatctattctgctaaaaaaaaaaaaaaa

SEQ ID NO: 145 - DNA, 4046 bp, Xenopus laevis
cacgagaagaaattgcacagtacactgatagtccctacatggctacaaaaaacatgccccccctatttcaggcattgacgactgccctatttttttgtggaattgccagcaaccctcttttccagccttctttggtaatggatatggctaaagttctgcttgacaattattgctttccagaaaacctcgtgggaatgcaggagaccattgaacaagctgtcaaaggtggggagattttacatatctcagatcctgacaccttggcaaatgtatttacatctggagtacaaggctacctaaatgatcctcgcctggttgtctcctatgaacctaattactctggtccccaaacagaacaatcactggagctaacaccggaacagctaaaattcctgattaatcattctgtcaaatatgatattttaccaggcaatattggctatctcagaattgatttcatcattggccaagatgtagttcagaaagttggtccccatcttgtcaacaatatatggaagaagctgatgccaacctctgctcttattttggatttaaggtacagcacccagggagaggtttctgggataccttttgttgtgtcttatctgtgtgactctgaaattcatattgatagcatttacaatcgcccttcaaataccacaacagatctctggacactgcctgagctaatgggtgagaggtatggcaaagttaaagatgttgtggtactcacaagcaaatataccaagggtgttgcagaagatgcttcttatattctaaaacatatgaatagggcaatagttgtgggtgagaaaactgcaggaggatctctggatactcagaaaataaagattggtcaatctgatttctatatcactgttccagtttcaaggtcccttagtcctctaacagggcaaagttgggaagtatccggtgtttccccttgtgtggtagtaaatgcaaaggatgctctggataaagctcaagctatccttgctgtgcgttcatctgttacccatgtcttgcatcagctctgtgatattttagctaataactatgctttttcagagcgtatcccaaccttactgcagcaccttccaaacttagattactccactgtaatatcagaggaggatatagctgccaaactcaattatgagctacagtctttaactgaggatccaaggttagtgctgaagagtaaaaccgatacgttagttatgcctggggattccattcaggctgaaaatataccagaggatgaagccatgcttcaagcactggtcaacactgtctttaaagttagcatactcccaggaaatatcggctatctgcgttttgaccaatttgctgatgtctctgttattgctaaattagcaccttttatagttaacacagtctgggaacccatcacaataacagaaaaccttattattgatttgagatacaatgttgggggatcctctacagcagttcctttgctgttatcctattttctagatccagagacaaaaattcaccttttcactttgcataataggcaacaaaattcaactgacgaagtttatagtcatcccaaggtccttggaaagccatatggttccaagaaaggggtatatgtactaacaagccaccaaactgctacagctgctgaagaatttgcttacctcatgcagtccttaagtcgggcaacgattattggtgaaataacctctggtaaccttatgcactccaaggtatttccctttgacgggactcaattgtctgtcactgtgcctatcattaacttcatagatagtaatggtgactactggttgggaggtggagttgttccagatgcgattgtcctggcagatgaagccttagacaaggccaaggagatcattgcatttcatcccagtatatttccattagtcaagggcactggacatcttcttgaagtccactatgctatcccagaggtggcatataaagtaagtagtgttcttcaaaataaatggtctgaaggagggtaccgttcagtggtcgatcttgaatctttggcttctctgttaacctctgagatgcaggaaaactctggagaccacagactgcatgttttctacagtgacactgagccagaaattttagaggatcagccaccaaaaatcccttcacctgaagaactaaactacataattgatgcactttttaagattgaagtattaccaggaaatgtgggatatctgcggtttgacatgatggcagacacagaaattattaaagctattggtcctcagctggtcagcttggtctggaataagttggttgaaaccaactctctcatcattgatatgagatacaacactggaggctattccacagcaattcctattttctgctcttatttctttgatccagagcctcttcagcatctatatactgtgtatgatcgtagcacctccacaggcaaagatatatggacacttccagaggtctttggtgaaagatatggctccacaaaagacatttatatacttaccagtcatatgacaggatctgcagctgaagtatttaccaggtctttgaaagatctaaacagggccactcttattggggaacctacaagtggagtatctttgtctgtgggcatgtacaaagtaggagatagcaatctttatgtgacaatccccaaccaagttgtaatcagctctgttactggcaaagtatggagtgtgtcaggtgttgagccccatgttatcattcaagccaatgaagctatgaatatagcccatcgcattattaaactgcgtacaaagattcccactgtcattcaaacagcagcgaagctggttgcagataattatgcgtttgctgacacaggagcaaatgttgcttccaaatttattgctctggtggataaaatagactataaaatgatcaaatctgaggtggagttggctgaaaaaattaatgatgacctgcagtcattgtcaaaagatttccatttgaaggctgtctacatacctgagaattccaaggaccgtattcctggagtagtaccaatgcagatcccatcaccagaattgtttgaggaacttataaagttttctttccacactgacgtttttgagaagaacattggctacataaggtttgatatgtttgcagactcggatctacttaaccaggtatcagatctgctagtggaacatgtctggaagaaggtggttgaccaggatgccttaattattgatatgagatttaacatcggaggccccacatcatccatcccaattttctgctcatatttctttgatgaaggtactcctgttcttttggataaaatttatagtcggacatccaatgccatgactgacatatggaccctccctgatcttgtaggaaaaacatttggctctaagaagcccttgatcatcctgacaagttctttgacagaaggagcagctgaggagtttgtgtacatcatgaagagactgggcagagcttatgtggtaggagaggttacaagtgggggttgccacccacctcagacctaccatgtcgatgacacccacctatatctgaccattccaacatctcgttctgccagtgcagagcctggggagtcatgggaaggaaaaggtgtattgccagatcttgagatttcctctgagactgctctgttgaaggcgaaagagatcttagagtctcaattagagggcagacgataacaattaatcacgtattctctgggaaaaatatgcacatactgctcagcatattaattagagttatgtaaagaaccgtgttgtatcacatctgtcttttgtatgccgaaaaaataatactgtatctgttcatatgtattgcagtgagttagttaggaataaatataagcaatctttgttggagatggctatctatgctagctataataattaccaccaatttcttttcttccttattatcattcctgatgaagggaggttttccccccccgaaatgttgaactattggtggcataataaaaggggcattttccccgactgcatttaaaaaaaaaa

SEQ ID NO: 146 - DNA, 1656 bp, Xenopus laevis
ggggagaacttgtagcgggttaggattgcggtccctttgcacttgtctcccatggcttcgcgccgggtttcacctgttgagttgcgcgacaaatgctccgccgggaagtgctgggtccttgtcggtaacaaagtgtacgatgtgtcggcttttgtcaacctccatcctgggggggagcgattactgcaggaccgggcagggaaagacatccaggcagatttgaatggagcccctcatcgtcactcggagaacgctcgccgctggctcgagcagtattatgtgggggagctggagccccaggaacagaagccgcagaacttgaaagagaaagcacaacaatacagctcagccacagaccataaagatgtttctactggaattcagtttaaaactttcagcccagagacggatttggtggactgggagaagcctttactctggcaagtgggccacctacgggagaagtatgatgagtgggtacatcagccgattaaccgtcctatccgactattccactcggactttgtggagtcatgttccaaaacagcttggtacatcgttttgtctgtatgggtccctgtggttctttatttatcttggtactgtctcacagaattggctcaaggaaacacaaggatcttctcttcattcaccaaagattattcagttcctgtgccagtgtttttcttctttccacttttccttattggagtattaatctggacacttatggagtatgccattcacagatttgtcttccacatgaacccacctgctagtaactactatctcatcaccctgcacttcatgttgcatgggcagcatcataaggctccctttgacagctcccgtttggtgttccctccagttccagcatcctttgtgattattcctctctatatcttggtgcagctgattttcccaattccagtagggctgtctatctttgtggggggactttttggatatgtggcatatgacatgacacattattatttgcactatggcagtcctagcaagggctcgtacctggcctggctaaagtcatatcatgtccgtcatcacttcgagcatcaaaagtctggtttcggcattaccagcaccttgtgggaccgtccctttaacactcttattcctgaagataaggataaagacagctagaatgtaccatgcttttagctttatacattcagaaaaacacctgctggcttgcagcctatggtacatacagggggaggagaaggtgttttttttgtttttttttaaataaaagatgtccaacttttgccattgatcccatgtgtcatgggatgcacgtcagcgggaaataattatttattaaggaaaaaacaaattgaaggggatttgtaagaaatgtaagaacgcctgggcttggcctcttcttaagctaattcaatgcaagtgtttccatagctgaaatggaccctgactccttgacaaaggagacacacacattgtattcctttaaaatcgcactgacagacttcagctttaaccctggcttcccctgtcaagtgaacagcacattgtaaatcccatagtgtgtatcaatgcctaaaaataaactaatattttctttttttaagaaaaaaaaaaaaaaaaaataaaaaaaaaaaaaaaaaaaaaaaaaaaaaa

SEQ ID NO: 147 - DNA, 1928 bp, Xenopus laevis
ataatctactagaacagagacggaaaagcagacgaggaaggagtaaaaactaaaagcaactgcaaaagaagacaacacattcccaggtgtttatacgagtgctgacatcacaaactagctggaacagtggacagccatgtcacattatcactgccagtagctatgaccatgcccctacccaacaaaaccactggagttacctttttgcatcagattcaatcctcagaactggagaccttaaccagaccacctctgaagatatcgcttgaaagaccacttggtgaaatgtacgtggaaaataacaggacgggcatattcaactaccccgagggcacgacttatgactttgctgctgctgctgcaccggtgtatagctctgctagtctcagctatgcagccagctcagagacattcggatctagcagtttgactgggctacatactttgaacaatgtgcctccaagtcctgtagtgtttcttcaaactccacaactatccccgtttatccaccaccatggccagcaagttccatactatttggagagtgagcagggcactttcgcagtaagggaagcggcacctccaactttttacaggtcaagttcagacaacagaaggcagagtggaagggaacgcatgtcatcagctaatgataagggccctccatccatggaatctacaaaggaaacccgatattgtgctgtttgcagtgactatgcatctgggtaccattatggtgtctggtcttgtgaaggttgcaaagctttttttaaaagaagcatacaaggacataatgactatatgtgtcccgcgaccaatcagtgcactatagacaagaacagaagaaagagctgccaagcctgccgactgcgaaaatgctatgaagtagggatgatgaaagggggcattcgaaaggatcgcaggggaggacgtatgttgaaacataaacggcagaaagaagaacaagagcagaagaatgatgtggatccatcagagattaggacagcatctatatgggtgaatccttctgtgaaaagcatgaagctaagcccagtgttatcacttacagctgagcagcttatcagtgccttaatggaggctgagccacctatagtatattctgagcatgactcaaccaaaccactcagtgaagcttccatgatgactctgcttacaaaccttgctgataaggagctagtacacatgattaactgggcaaagagagtgccagggtttgtggatttaacactccatgaccaggtacaccttctggaatgtgcttggctggagatcctaatggttggtttaatctggagatctgtggaacatccaggcaaactttcatttgcaccaaatctgttactggacagaaatcagggacgctgtgtggaaggcttagtggagattttcgacatgctggtcactacagctacacgatttcgcatgatgaggttacgtggggaagaatttatatgtcttaaatctattattcttctaaattctggtgtttatactttcctgtctagcacattagaatctcttgaagatacagaccttattcatattattttggataaaataatagacacgttagtccacttcatggctaaaagtgggctttctctacagcagcagcaaaggcgactggctcagcttcttctcattctttcacacataagacatatgagcaataagggcatggaacacttgtacagcatgaagtgcaagaatgttgtccccttatatgatttactgctggaaatgctggatgctcatcgcatacacacaccaaaggacaaaactacaactcaggaggaagatagccggagtccacctaccactactgtaaatggtgcatccccttgcttacagccctattacacaaacacggaggaagtgagcttacaaagcacagtatgagagagatt

SEQ ID NO: 148 - DNA, 3827 bp, Xenopus laevis
ctgaagtccggtctgggacattgggagaggagcacagtcctagaagcatccagacccccaccctgaattcccccctcctgagtcctggccagggggtctgcactgcactctaacaggagtctcgtctcttgctccaaacttcttcccctctctctcagacacagaaagagaaaactgcctaagcctgggctggacacctgcactgtgggacacggctactgaatgaatgagactgcctgggggaaatcagagggctcctgggaatgacagagacaccctgggagattgagcctgtgcgagagggagacactcctatccctgctggcagggtgtagcactgagcactgctgtcgttgtgtatctgtataaaagtgctgcttattgtgtacccactgcctctctatagttggggtgcagggcaaataggttggtgatcctgtcacccctctttatcccttgggcattgtgcttccattgcgctacaggtgtgaacgtggtccttcagtgccgtgatatacttgtgtggcagccgacatggcggaacaagaggggctgcagtatgggaaggcggattttgttcttatggactcggtcaccttaccggaattcatggagaacctaaagctcaggtttgagaagggccgaatatatacatttattggggaggtggtggtgtcagtaaatccgtacaagaacctgcctatctatgggagagataccatcgagcagtataaagggagggagctgtatgagagaccaccccatctttttgccattgcagacgctgcctacaaagctatgaagagacgatgcaaggatacatgtatagtcatatcaggggagagtggagctggcaagacagaagccagtaagtacatcatgcagtacattgctgcaatcaccaaccccagccagagagcagaggtggagagggtgaaaaacatgctgctgaaatccaactgcgtcctggaggcttttggaaatgccaagacgaatcgtaacgacaactccagtcgctttgggaaatatatggatataaactttgacttcaagggagaccccatcggggggcacatcagtaactacttactggagaagtctcgagttattgtgcagcaactgggtgagaggaacttccactccttttatcagatgattctaggtgcccccgagcagacccttcgctccctccacctacagagggatatctcttcatacgcctacacccgctctcttgctcagctcaagtcttctaataatgatgcgggagattttaaagaagtcgctgaggccatgaaagtgattgggttcaagccagaggagattcagacagtgtacaaaattctggctgccattctacacctggggaatctcaagttcattgtggacggggacaccactctaatagagaatggcaaagtcgtttcagtagtggcaggccttctgggcactaggtctgagcaagtagagaaagcccttctcttccgaacggtggccacaggaagggatgtaatagacaagcagcataccgagaaggaagccaattatggcagagatgcttttgccaaggccatctatgaacgcctcttttgctggattgtgaatcggataaatgatgtaattgacgtgaaacagcaggatgcctctctgcatggaaagaacaccgtgatcggtgtactggatatatacggctttgaaatttttgataacaacagcctagagcaattttgcataaattattgcaatgagaagctacagcaactgttcatccaacttgtattaacccaggagcaggcagaatatcagagagaggggataccctggaaacatattgactattttgataaccagatcattgtggacctggtggagcagcagcacaaagggatcatttctttgctggacgacgcctgtatgaatgtcgggaaggtgacggacgacatgttcctggaagctctgaacaaacagctcgggaaacacgcgcattactcgagcaggaaggtctgtgctacagataaagcgctggagtataaccgagacttccgaatccgtcattacgctggagatgtggtttactctgtggtgggatttattgataagaacaaggacacgcttttccaggatttcaagaggctgatgtttaacagctccaacccagttctgaagaccatgtggccagaagggaagctcagcatcacggaggtcaccaagcgaccacttacagcagccacgctcttcaaaaactccatgattgctctagtagataacctggcatccaaggaaccgtactacgttcgctgtattaaaccaaacgaaaagaagtctcccgctctattcgatgaggtgaggtgtaggcaccaagtggaatacctgggtttgctggagaatgttcgggtccgaagagccggatttgcatatcgccaagtgtacgacaagttcctccacaggtacaagttaatatcgtctctgacctggccaaaccacagcctgccttcagatcgtatagctgtggaaagattcatggtcgactgcggcctcaaccacgatgcggcttatggcaaaaccaagatcttcatccgcacgccgcgcaccttgttttccctggaggagaggcgcagtgagatgctcatcagaatcatcctctttctgcaaaagctatggagggggacacttgcacgccggcggtgtaagaggattcgtgcaggcctcacaatccttcgctactacagacgctacaaggtgaagtcttacctgcgtgaggtcatgcacaggttcaacggagtaaagaacagtcgagactatggcaaacacgtgaaatggcctactccacccagggtgctgcggcgcttccaggaggccctgcagaacatctacaacagatggagagggtaccagataatcaagagcttgcctccagcagaaatacccaaggtcagggctaaagtcgctgcctttgagaaccttaaagggcacagagtggatatgggacttcagagatgctgggaaggaagctacttggcctcgaatcaagagaacgctcgcaattctaaccagtttgtttctcgctccaatgagctccaaagaaaggacaagttcatgcaggcactgttctcctgccatgtgcagaaggtcaaccggtttaacaaggtacaagatcgcgccatctttatcacagaccgacacttatataagatggatcctgggaaggagtataaagtaatgaccagcactccactttataatgtgtctggcattagtgtgaccagtgggaaggatcagctggttgtcttccacatgaaggataacaaagacctcattgtgtgcctgggatgttctggccaaggcccttacgacagccgcataggggagctggttggagtcctggcaaaccatttcaaaagtgagaggaggcccctgcaggtgacagtatcgcacccaatccagtgcagacagcacggccggtcctgctcaattacggtggaaaccaagatcaaccagtcacagcctcagttcaccaaaaaccgtgcaggtttcacactcagtgttccagccaattaaccttcctgtaatctcggcacaacgcttagcagctcgccaattccacgctttccaggcttgcttgattgaatggcgggggactggctcccctataatttttatttcagcaggactgtgcacacattcctacctaccataccactgtcttcacttagaagctttaaaatacatgaaccgacgcggagtaataaaaatcatggacattgcaaaaaaaaaaaaaaaaaaaaaaaaaaaaaaaaaaaaaaaaaaaaaaaaaaaaaaaaaaaaaa

SEQ ID NO: 149 - DNA, 3656 bp, Xenopus laevis
gtttaaggaaagaattcttacatttccttttatttggggatttattgattttttaattaatttgtgaaattttttccccccacccccctaattggattccgccgagagtgaggaaaaaagatggggagaggggagggacgggagtattctcccgcagcaaccaacgcagacaatggagggggcaagaagaaacagaaagaaaaggagatggatgagctgaagaaggaagtggccatggatgatcacaagctctccttggaagagattggtcgaaaatatgggacggaccttgctaagggtttgacaaatgctcgtgcagcagagattctggcccaagatggacccaactccctcacaccaccaccaaccaccccagaatgggtaaagttttgcaggcagctcttcggcggattctccattctcctgtggattggagccattctgtgctttctggcctatggtatccagattgccatggaggatgaaccagtcaatgacaatctgtaccttggagtggtcttagccgctgtcgtcattgtcactggctgcttctcttactaccaagaggcaaaaagttccaagatcatggattccttcaagaacatggtgccacagcaagccttggttatccgtgaaggagagaagttgcagataaatgctgagcaggtggtggtcggagagctggtggaaattaaaggaggagatcgaatacctgcagacttaagaataactgtagctcatgggtgcaaggtggataattcctctttgacgggagagtctgaaccccaaactcgctctccagaattcacccacgaaaacccacttgagaccagaaacatttgcttcttctctaccaactgtgttgaaggtactgccagaggaattgttatcgctacaggagaccgcactgtcatggggcgtattgccaccctagcttcaggccttgaagtaggccgcactcctattgccatggagatcgagcatttcattcacattataactggggtggccgtgttccttggactcagttttttcatcctttctcttattcttggctatagttggctagaaggtgtgatattcctcattggcatcattgtggccaacgtgccagagggtcttcttgcaacagttacggtgtgtctaactctgactgccaaaagaatggcccgcaagaactgtctggtgaagaacctggaagccgtggagacacttggttccacctcaaccatctgctcagataagactggaactctgacacagaatcgaatgactgtggctcacatgtggttcgacaaccagatccacgaggctgacaccaccgaagaccagtcaggcgcaacatttgacaaacgctcccctacctggactgctctgtctcgaattgccggactttgcaatcgcgcagtcttcaaagtgggacaagataaaatacctgtgtcgaagagagacaccgctggtgatgcctcagaatcggctctgctgaaatgcattgaactgtcctgcggctcggtccggaaattacgggatcggaacccgaaagtggctgaaatcccatttaattctacaaacaagttccagttgtctgttcatgagcgggaagacagcccggagggccacctcttggtgatgaagggggccccagagagaatcttagatcgctgttccagcataatgattcacggccaagagcagcccttggatgaggagatgaaggatgctttccagaatgcctactttgaattggggggactgggagagagagttctagggttctgccacttctacctacctgctgataagttccaacgtgggttcaagtttgactcggaagatcccaacttccctatcactgacctttgctttattggcctcatctccatgattgatccccccagagcagcggtgcctgatgccgttggaaaatgccgcagcgcagggatcaaggtgatcatggtaactggcgaccatccaatcaccgcaaaggccatagccaaaggtgtgggtatcatctctgaaggaaatgagacggtggaggatatagcagaccgactaaacataccagtcaaccaggtgaacccaagggaggcaaaggcatgtgtgatccatggctctgatttgaaggacatgacctctgaacaactggatgacctcctcaagaaccacacggaaatcgtctttgctcggacctccccccagcagaagctgatcattgtcgagggctgccagagacagggggcaattgtagcagtgacaggggatggtgtaaatgactccccagctctaaagaaagcagatatcggtgtggccatgggaatcgcgggatctgacgtctccaaacaggcagccgacatgatcctattggacgataactttgcttccattgtgacgggggtagaagaaggtcgacttatttttgacaacctaaagaagtccatagcctacacactgaccagcaacatccctgagataacccctttcctccttttcatcattgccaacattccgctgccactggggacagttaccatcctctgtattgatcttggaacagacatggtgcctgccatctctctagcgtatgaggcagccgagagcgacattatgaaaaggcagccaaggaacccgcggacggacaagctggtgaacgaacgtctaatcagcatggcctatgggcagattggtatgatccaggccttgggtgggttcttcacctactttgtaatcctggcggagaatggatttctgccctacaccttgctgggaatccgcttggactgggatgatcgttccaaaaatgacgtggaagacagttatgggcaggagtggacctatgaacagcgcaaagtggtggagttcacatgccataccgcattctttgctagtatcgtggtggtgcaatgggctgatctaatcatctgtaaaacccgaagaaactctgtgttccagcaaggaatgaagaataagattctcatctttggtcttctggaagagacggctctggctgcattcttgtcatactgtcctggaatggatgtggctttgagaatgtatcctctcaaggtgacctggtggttctgtgcattcccctacagcctgctgatatttttgtatgatgaagtaaggaagctgatcttgagacgtgatccaggcggttgggtggagaaggagagctactactgaggagcctgtgcccactggagttggcttggggaagagaacaagttttgtagatgtctcactttgggatactcacatagggttgtattttaaaggggagtaaatggtaggacaagaagacctgacccaatgagttgagtcatcatctctgttgattttttcttttttcggagcaggacgagttattcaacatgacgattttgataacacagttgatctgccgagccaagaattatggaagccccttcccgaactaaccatagcatgtgttgaaatgaaagtgttcttccagtgaccctaatgtcttctaacatatccatgaataatctaccatgccagtctttattctcattacctcttgccctgcgtccttcttgtacagtgactcttgcctccctgtttttatcaagccgcagagttatatataatacaaacaataaaaatatgcattacattttaaaaaaaaaaaaaaaaaa

SEQ ID NO: 150 - DNA, 2214 bp, Xenopus laevis
agcggattgtctgacagcgggggacacactgcacctcttagttcaccatgtcctggttatttggtcttaacaggggccaaccggaacctcccggcgtcccaggcttccccgagccccccagccctcctggtggcagtggggatggaggggacaaaaacagacccaaggacaaatggagcaactttgaccctaccggcctggagagagctgcaaaggccgctagagagctcgaccagtctcgccatgccaaggaagctcttaatcttgcaaaggtgcaagaagaaaccctgcaaatggaacagcaagccaagatcaaggaatatgaagcagcggtggaacagattaaaaatgagcagatcagagtgcagtcagaagaaaagaggaaaacattgaatgaggaaacaaagcagcatcaagcgagggctcagtaccaggacaaacttgccagacagcgctatgaggaccagctgaggcagcaacaactgcaaaatgaagagaatttacgaaggcaagaagagtctgtccaaaaacaggaggccatgcgtaaagctactgtggaacatgagatggaactacggcataagaatgatatgctccgcattgaggcagaggctcatgcccgagctaaggtggagcgtgagaatgccgatattatccgggaacagatccgactaaaagctgctgagcatcggcagactgttctggaatctatcaagactgcaggaactgtgtttggagaaggatttcggacctttatatcggactgggacaaagtaacagcaactgttgctgggctgaccctacttgctgttggtgtctacactgcaaaaaatggcactggtgtggctggtcggtacattgaagcccgtcttggaaaaccatctttggtcagagatacttctcgtatcacggtggtggaagcaataaaacatcccattaagatcagcaaacgaatcttcagcaagatacaggatgcactagaaggcgtcatcctgagtcccagactggaggagcgggtgagagatattgcaattgccacaagaaacactaaggcgaacaaaggcctttatcgaaacatattgatgtatggtcctcctgggactggaaaaacactttttgctaagaaattagccatgcattctagcatggattatgccatcatgaccggtggtgatgtcgcccccatggggcgtgaaggtgttactgcaatgcataaagtctttgactgggcaggcactagcaaaagaggccttctactatttgtggatgaagctgatgcctttctaagaaaaagatccacagagaagatcagtgaagacctcagagcaacattaaatgcttttctgtatagaacaggagaacagagtaacaagtttatgcttgtactggctagtaaccaacctgaacagtttgactgggccattaatgaccgaatagatgaaatagtccactttgaccttcctggtttggaagagcgagagcgcctggtcagactttattttgataaatatgtgttacaaccagcatcagaaggcaagcagcgtttaaaagttgcacaattcgactatggcaaaaagtgttctgagcttgccacactcactgaaggcatgtctggccgtgagatttccaagctaggagttgcatggcaggcggcagcttatgcctctgaagatggaattctgacggaagccatgattgatgctcgcgtggctgatgcgatacggcagcaccagcaaaagatggagtggctaaaggcagagggcaaggaaagtactaaagaaattgggaaaaacccactgcagcctcttctggaaggcaccccagtttgataaagtacaaatcagtcttgcagaagacaacagcagccacgtatctgcctcgccctactgtccccaggcaatgggtccacaagctgctggtgatgcaggatttacctcattgactctacagagagctttgtcatcacacagaactctctgggacagaggttataggcagcagggatgtaggctcatacactcaggagatgtcccttcattcttgcctctctcattccctctcaaatgatctttttttgttttatattcttttagagtaaccatgattgttaatatattatgaaaaggaataattgttttaaaatgaattgaagacgctgcattaaacagtccctgaggaaagaaaaaaaaaaaaaaaaaaaaaaaaaaaaaaaaa

SEQ ID NO: 151 - DNA, 1723 bp, Xenopus laevis
ggcagagccgccgagggaagtgtccaatagacccgaccgagccgtgaagggagcgacagagccaccgcagcgcccagcctgctcctccacttgtccgggctgttgttctcccatcaagatgtctgctaaagccaccatcagtaaagaagtcttcgccccacaagatgaaagaatgctgggtgctgttctagtgaagaggaggacaaagaaaagaattcccttcttagcaactggtggccagggagaataccgcacatatatttgcatctcagttacaaacaagcgcccggcccaggtttacatcacaaaggtgaagcagtttgaaggggccacaagttttgtgagaagatctcagtggatgctcgagcagctgaggcaagttaatggcactgatgcacacagggagtctccagaatttgacctgcagtttgacaatggttttgatcagtgggtggcaagttccggctctgagaaattcaccttctttcagatcctttatcacacgtgtcagaggtacctgcctgaacggaaacctgaattcatcaactgtccgcccaaactgttctcaggcaacagtattcttcactctgcagccgacagtgtaactagtgctgtacagaaagctagccaagccctgaatgagcgcggggagcgactgggccgtgcagaagagtcaactgcagaaatgatgaatagcgctcaacagtttgccgatactgcgcacaagcttgctatgaaacacaaatgctgacacttgcacgggacaaaaaggggggacttcctgccagaatatgccaaaacctcagcacaagattattacatctcttttattttgaacgggatacttgccaattggcctgtgtttcctgctgcacatccctgagtccctctggagaagggctaaactgcagacaatgcaatctttccatctgatgaactggacttgggggagaatcggttctggacgtgaccctcagcctttggatctctgcagcccctcatctcgttgctgttgtacagatcggtttcggcacatttggctctgtagcctctgagatccgtgatgagtgttctgtcaatcacagccatgggttacttgaaggtctgaagcagcactagagatttttaagcagtgcaactgttttttttaaagaatcctcatagtcaacacactgaatacagctagtaaaaaattccaatgagtgtgagactgcatagtgcattacatgaaatgagaccgcatacgttaattaaagagatgagcattgcatgattggtgataatgcacagtaggagagcactggccgaggcaaggtacacagagtatgaaatgccaagagtgggttagctgtacctgatgccgttccttgtgcagggttggaacattggaccgaattacagggattgttcaaacatccgaaatccagggaatgcaccattgctttcaaaaataggagatgtgccagcgcctagcacttagtaatattatgcattccctttctgtgcgcaagagtagaccatgtagctttttggactttagtgacccattttatctttgttttaggtcgtgcaatgccagctttccgacaaatgtcggcacgtgttcttttttgttttgttttgttttttttaaacatttctgcacattttaatttgatccatgttaatatctaaaagcaataaaggggttcatatctggtgaagatacaaaaaaaaaaaaaaa

SEQ ID NO: 152 - DNA, 2566 bp, Xenopus laevis
gactcgctgcatggagagacacacaggctcggccgggaacactcacatacaggacagacagctgttagttgtataatctgcagagagaagcatgagaggcacaaggaagtatcagcatgtgatcgagacccctgaccctgggaaatgggagctggcgggatacgaggaatctctgccaatcagtgagaagtccaaccccatgacgcgggagctggataaagccgacccctcccagttggtgcagctcctgagagactgtgatgccgagatattccaggaggaagatgagaatctcattcattatcatagactgtacagcgagtcggtgttgaagacaatgggggatgtagcaaagagggtgcaggaggtattaaagaatcctgatgacagtctggtggttctgagtggctgtgggacctccggccggctggcccttttacttgctaattccttcaatggactcttgaaggggctgcacaagaccccctgttactgctacatcatgtcgggaggggacagatcgattgtcacctctcaggaatcttcagaagataacccccagctgggggcccaggaattagagaaggtgtgtgaggggaagaagaacgtgctgtttattggcatttcctgcggcttgtctgctccgttcatcgctggtcagttggatttctgcatgaggcacctggatgtttacctgccggtgttggtgggatttaacccagtcagtatggccaggaacgagcgcatcgagggctggcactccagtttccgacaagtggccgaacggctccagaccctgcacgactctcagaagggcttcattctcaatccggctgtggggcctgaaggagtgagtggttcctcgcggatgaaggggggaagtgccaccaagatccttctggagactctgttgttggtggcccacaaggctgagtccaatgtgccggtgactgagaagtgcctgttggaaattctcaggacgtatgagagggcccacaaggtcacctactcccagagcaagaaaattgcagccctgatgaaacagacggcaacaagcctacagaaaaagggccatctgtacatcctcggctggggcaccctggggctagtgggcataatggatgcagtggagtgtgtgcccacctatcaggcagactggagggacgtgcgtgggtttatcactggcggttaccactccatagagaacaaggaaggggatctctcgtcactgggaccccagttctccatctcccatgaagactttgtgaagaacgttctcccctcagtgtcagaaacagacaccgtcctgctcatcttcactctggatgatgacctcaaccaaatagaaaagctggtggctctggtcaaggagaagacctcaaatattcaagtcatatgccatgcgacagccggacagtacttgccgaactcactcaagaaaacaattccaagtatcattggtctgacgtggcctatcctgttcttggagtatgagggtgcttttatccagaaattccagagggaactgagcacaaagtggatactggacacggttacgagtggcgcctacaccctgagggggaagatcttcagaaactttatggtggacttcaaaattaataactcaaaactcttccaccgagcaacgtcggttctccagaggctaacaggacagtcccagcagcgctgcacagaggtgctcctccagtccatttatggggaacagaccctctcggagcagattaggaacaccaccattgctggacatgtagaagcagctgcctcgcaggacaaggtgcttccggtggccattgtgagtttgctgagaagctgcacgatacaagattccagatcccggatcaactcctcattgtccatccgctcggccattgagtcgtcaatgaatgtgcccgggaggaagaggggggccgaggactcggagagtcgatgagagacacaagatcatcagtaatgaccagtcacttgatttactgacctgagaactgggggtgccgggaggttatttgcatggacccagctctttatttctattggtcgtgttatatataatgtcactgggtgcccagcagtgccagggttgtgcccacaggggaggaatatttatgatataacaggaacgtaccacttactggaaggatcggggtaaattcccccgtgtgacacaaacatgtagggccacattccaaccctcgtccccattgcttctgctcctcttcctcctagtgcattgcaatcatgtctctctctaggggccccacctgccccagcccagggcaacttctgcttgatacctggcacaacatccatttaaaggggaagtattccctctttataacggtgcagaggagacatagtagtgcgaccaactgcaagtgacaaattgtgaatgaggaaaaactggcaatgccccgtgtattacacaatgcccacctacatatctgcttctcttctgctcccacaatgctccttgtttttcctatggactctcattcacacaatctatggatttccctgtagaataaacatccagaaaaaaaaaaaaaaa

SEQ ID NO: 153 - DNA, 3435 bp, Xenopus laevis
gcggggaagtatttccgggaggactttgtgctactgttttttccatcccccagcagcacacgagccggtgacacaacatcaacaggagccgtggaggacaaactgtgacagttcctccatgcagtccctccttcatctacctcctaagggggctctgccagccacttctttgaggaggtttaggtgtctactaaaccagctgctaaaccatcgaggagcaataccacatacagttttccggagccaaagctcatctacagttacaggtgacacggttagcattggggatgtatcctataaagtcaaattcccaaagaacccagaactggtgccccaaaattacattcctgatcccttagcccaagcaaatgtgcaacacctaagatggatcatgcaaaaagacctcctgggacaagatatttttctcattggtcctcctgggccactgagaaggtccattgcaatgcaatatttggagctgactaagcgtgaggtggaatacattgctctctccagagacacaactgaagctgatctaaaacagaggagagaaatacgagcaggaacagctttctacattgatcagtgtgcagtccgggcagccacagaaggaagaattttggtgctagaaggtttagagaaggccgagagaaatgtgctaccagtgttaaataatttgctggaaaacagagaaatgcagcttgaggatgggcgcttcctgatgtctgctgaacgttatgataaactacttcaggaacacagcaggagtgaactggacacttggaaaattgtgcgagtaagtgaagattttcgagtgattgcattgggactaccagtgcctaaatattcaggcaaccctcttgatccaccacttcgctcaagatttcaagccagagacatttattatcttccatttaaggatcagcttcaaatattatattcagctggatcaaatgtccctccagaaagagtttctcagattttgtcgtttgctaccactttgtgctcacaagaatcatctaccttgggtcttcctgatttccctgcagacaatttggaatcagcaataagaattttggatgcgttcccaatggagtcttctcagcgtgtcatagaaaggctttatccatacaatgtactattgggtaaagaaggcaaaagctcagtggagggtgcactgaaaaggtttgaactaatggactcaggaagatcatcgttgcctatgagaatcgggaaagtggactcaattacacaattacacaatatttccagctctctagctgctgtcaatatacacgttggagatagtactgtgtgtataaaggtaccagctggaagcaggcctttgaatctacatacagaatcaacacaattcataaaaactaacagccatgaactgctgctggcagaaatgatgcagtctcacatggttaaggatatgtgcctcattggaggaaagggatgtggtaaatctgtgattgctaaagagtttgctggaatgctgggctatgaagtagaacctgtcatgctgtaccaggacatgacagccagggatttgctacaacaaaggtacactcttccaaatggtgacactgcctggcgtcagtccccacttgtctctgctgctattgaaggcaaacttgttattctagatggtatccatcgtgtgaatccaggaaccctgtccatactgcaaaggctaattcatgaccgagagctgactctctatgatggcaccaggttacttagaaaagacagatatcaatatttaaaggaggaattacaactttctgatgaaaaactacaggaaagatctatatttcccatccacccatctttcagaataattgctctggcagaacctcctgtgttcggtggtaacactcagcagtggttgggtcctgaacttctgaccatgtttctttttcatgaaatcaagcccttaactaaaaaggaggagattgaagtaatcagaggaatggtgccaggtgttccaaaggaggcagcccatcagctgctaacattgacacacagacttcgtgacacaaaagatcctacagcaaagtctttggcttcatctttatcaacaaggcaattacttagaatctgccgtcgcctggctcagtacccagaagaaagtctttatcatgctgcaaataaggcctgcctttcaagatttttaccaaatttggctagatcaactctgcacaaaagcctagtggattctggtgtagaggaaaacattatggatttggaaagaacacaggacaaagattacagctgtgaaataaattctggtgtactgagggttggtaacatttctgtgccaatatataatccaaatgaaaagatgaaagttcctgatgtccttttttatgaaaacaaacagcatatgatggtaatggaagacatgctaaaggattttctacttggagaacacctcttgcttgtggggaatcagggtgtgggtaaaaataagattgttgacagatttctacatttgttaaacagaccacgagaatatttacagctacacagggatacaactgtgcagagccttacattacagccatctgtaaaggagggtgttatagtgtatgaagactcacctctagtgaaagcttgtaaaaagggacatatcttggttatagatgaagccgacaaagcaccaacaaacgtcacttgtattttaaaaacattagtagagagtggagagatgattctttcagatggaaggcgacttgtggccgatctttccaaaatggatgcaagaccaaatctgattgctattcatcctgattttaagatgattgtgctggcaaacagacctggatttcctttcctgggaaatgatttttttggtgcattgggtgatattttcagctgccatgcagtagacaacccgatgccggagtctgaactcgcaatgttaaaacagtatggacctaatgtacctgatgcagttctgcataaacttgttgctgcatttggagagttaagaagtatggcagaccagggaataatcacatatccttactcaaccagagaagttgtcaacattgtgaaacatttacagaaatttccaaatgaaggacttgcaaatgtagtaagaaacgtttttgactttgattcctacaaccaagaaatgcgggaaatattaatgaactcattacacaaacatggaataccaattggagcaaagccaaccaatgttcagctggctaaggagtaaggaaaataggtttcctaaacattctacgtgtattataatacattattgtggctgctaatatgtagtatatttacttgttactggttataattgacaaatatattttaacatttcaatcttaactgtatagcattttagaaacactttactgtatgaattataataaatccgttcattctgttcacattaaaaaaaaaaaaaaa

SEQ ID NO: 154 - DNA, 1040 bp, Xenopus laevis
gtgacagagtgtgtgcgcgctagagtgtttaatagaagatggccgggggtctagttcgaggcaagctgatagcggttatcggggacgaggacaccgtcaccggcttcttactcggtggaatcggggagctgaacaagaaccggaaacccaattttttggtggtggagaaggagacgagcgtaaccgagatcgaagagacgttcagaagttttctaaatcgtgatgatataggcattattttgatcaaccagttcattgctgagatgatccgtcatgtaattgacacgcacaccatctccatccctgcagtacttgagattccttcaaaagaacacccgtatgatgcaaccaaggactctatactgcgcagagccaagggaatgtttacaatggaggatttgcggtaattcggaaaacatttcggcaaacgcagggatctgccctacatcaatcaggtcctgctgagaggctcgattccttctgttggtcatagccagtaacccttttctcaattaatgctgcctgtgtgtggcattaattagttgttaaatgttgattatgaaattaaaattgtgtttccttgctgtgtgttatctcctcaactgcaaatgttaaatctttgcccccaaagtctgtattgcctagaaaagtctccatatggcttatgctcagaaatatactttttaatagactatttatagttaattaaaaaaaagaatatttaaatgctcattatggttactgagaagtcagagattggcagcttacatttaaatatgtacactggctactatcaatgcttttgagactgtgtactattgaaataaaatatttagtgcatgtcattaaagtcattgtgggaaatcctaagatatctgtgaatgcagaccgcatcaaaaatgcaaaaaatgggaaccaaaccccaagatgttcactatgtctttaccttataattgcaattgtggtgtttatcctaataaaaatatattatcatagaaaaaaaaaaaaaaaaaaaaaaaaaaaaaaaaaaaaaaaaaaaa

SEQ ID NO: 155 - DNA, 2093 bp, Xenopus laevis
ataaacattagaaagaaagttggatggcagatgtagagttgaacggagggatgactacaatctcttctacaccagccgctgcgcagagtataaaccctctctccagaaagctcaacaagattttggaaacccgcctggataatgacaaggacatgctggaagctctgaaagcactctctgcttttttcactgaaaacagtctgcgaagccggaggaacttacggggggatatagaacgtcgcagtttgactattaatgaagaatttgtgggaatagttaaaaaagttcgggaggaacttgaaagcataaatgaagatgtacaagcaatgagcagctgctgtcaggacatgactagccggttgaaggcaacaaaggagcagactcatgatttggttgcgaaaacaacaacgcttcagtcagaaaatcagagactggaaatccgagcccaggttgcagatgccttcttactaaaattccagttgacgtccgatgaaatgaacattctcagaggcaccagggaaggacctttaaccgaggactttttcaaggttttgggaagagtcaaacaaatccacaatgatgtcaagctactcttgcgtaccaaccaacaaactgcagggctggaaatcatggagcaaatggctttgcttcaagaaacctcttatgagcaactttaccgttgggcacaaaatgactgcagaacgttgacacaagagtcatgtgatatctctcctattctggctcaggctatggatgctctgcaggacagacctgtactctacaattacaccttggatgaatttggaacagcaagaaggagcgcagtggtccgaggattcattgatgctctaacacggggaggacctgggggcacaccacgacctattgaaatgcattcccatgatcctctgaggtatgttggagacatgctggcctggctacatcaagcaaccgcgtcggaaaaagagcacctggaatcactgctaaagcttgtaaatattcaaggcgttgaagataatatccaggaggtggtcggtcacatcacagagggtgtttgcaggccattgaaggttcgtattgagcaagtcattattgcagagcccggggctgttttactgttcaagatttccaatctcctaaagttttaccatcataccataagtgcaattgttggcacaagcgcctcttcactgctgactacaattgaagaaatgcacttattaagcaaaaaaatattcttcaatagcctaagcctacatgcaagtaaactgctggataaagtggagctgccccccgccgatctcgggccgagttctgctttaaaccagacgcttacattattgcgggaggttcttgtctcccatgactcttctgttgttccactcgatgcacggcaggctgattttgtacaggccctgtcctgtgtgttggatccattactacagatgtgcacagtgtctgccagtaatttaggaacagctgacatggccacttacatggtcaattgcctctacatgatgaagacaacacttgctctatttgagtttacagacaagcgcctggagatgttgcagttccaaattgaagcacatttggacactcttgtaaatgaacaagcctcatatgtattaacaagagctggactaagtcagatatatagctgtgtacaacaacacaagcctgagcaggggccactatcaaacctacccagtatggattctgtatccctcaaggctgctatggtgcaatttgaccgttacctggcggctcctgacaacttgcaaatgccacagctgaactactttttaagtgccacagtaaaagaacagatcattaagcaatctacagaattagtctgcaaagcctacagtgaactctatgaagcagttatgaagccagtgaacggatacaaggacccaaccagcattctgcatagatctcctcaacaagtccagactctgctttcctaaaggttacttattgcagcatttctttcctggaagtatttatgtaataggctgaatacattgagtgtgaaggtgattgtaaataaaggattatacatgatgacacccataaaaaaaaaaaaaaaa

SEQ ID NO: 156 - DNA, 2888 bp, Xenopus laevis
gagagaggcagagagagagagagcacgggacagagactgttacagaatgcacagaagacagaacagaacagaaaggagtctcccaggcacagctacaggtagaagggctcatatctgaagtctatattccctggcatgtgctgcctttaaacttttggactaaaatttgagatacctgaagaagttctgctgctacactttaaacatgggagtcaaactggtagatagcaaggcggagagtaaatccataactggctgcaagaagggaatattcaacaatatcaaggtgtttgtagtttgccatgctctcctgcagctttctcagctcttatacagtgcttactttaaaagttgcctaaccaccattgagaaacgctttgggctttcaagctcctcttctggccttctctcaagtatccacgagatcagcaacgctgttctcatcatcttcgtcagctattttggaagccgagttcacaggccacgagtcattggtgtaggaggtcttctactggccttggggacgtttcttctgaccgtgcctcattttgtatcagagaaatatcagttcactgcactcgatagtggcaacaaaagtcaaattctactgtgcactgaagagaacaggacttctcattgtaagacacaaggccagcacgtatcaacgacgaccaacaatgggggcaccagcatgtgggcaataatggtggtggggcagctgctggctggcattggtactgttcccatacagccttttggcatctcctacgtggatgattttgctgaaccaaacaattctgctttatatatcgccatcctgttttcagtggctgtgtttggccctgcgtttggatatcttcttggctctgtggtcctgaggatgtttgtggacattggaagagtgaatcttgagcatgtggatctgacagtagcagaccctcgctggataggtgcctggtggcttggccttctcattgcttcaggctgcctggtgatcacttctatcccatatttcttcttcccacgggaaatgctgagaaatgagaagccatcaccggagcagaatgtcctgagaaagacaccagacgttaaagcagaagaaggttctctgaccaactttataaagaagtttcctcggtatttcgcacggctgttcacgaatccaatctttctgatgttggtcctgtgccagtgcagtttctcctcggtcatcgccgccttgtctactttcctcaacaaatttttggaaaagcaatacagctcaagcacttcctatgccaactttcttattggagcagtaaatctgccatcggccgctctgggaatgttgataggtggaatcattatgaagaggttttgtatctccctgcaagtcattcctcgttttgctctggcaatccttcttctttccattatgctctgtgttcctcttttcttcatgggctgctcaacacaggcgctagagatgggaattaccaagcactcaccaagtggaaacactctctccaactgtacctcgcaatgtgcatgcccagaatatgccttccaaccggtgtgtgggtctaacggagtggaatatctgtctccatgtcacgcaggatgtagatcactcaatgaaacatcatcagagaaacttaggatgtatcagaactgctcttgcgtcgctgacatttctggggaagggacggcgaagacaggatcctgccctactagttgctctcaccttctgctgcccgtcatgttccttatctcctttgctggtctcattgcctgtctgacacacaaccccctgtatatgatggtgttacgggttgtgcaacaggatgaaaaatcctttgcgattggagttcagttccttctaatgaggtttttagcctggttgcccgctccagcgctctttggacttgtcattgactcaacttgccttgtgtgggatcaatcctgtaccggaacgagaggggcgtgcagatattataataatgatcttctacgtaacaggtatcttggtctacagatgggatacaaaattctagggatattgttattgtgtgttatagcctggaaggtgaacaagcgcaaggaatacaatgtgcaagaaaaagaatctggcatggcataggcataatacagtatccagagactcttggcttccaatgttgtaccccaccccaaaactctcttcctcagggagcagtcaatactcatcattccagagcctcttctatcaatgcaagtcacaccaccgaggctgatattgggccagctggacccgaatcaccctttcaaggacatattcgggatggcaagccaaatgtagatcatgcagcatgtgttaaggaaaccttttgtatgatgcaatatcatgtatataccaacatgctttcctacagctctgcattcaaacacagactgagatgaagttcagaacccaaatacagtatttaacccttctgctagaagactttcaaccttggttgtatctgcaatcaagctacaggaatcactgtttctggtccaagcaccatttttgtattaatgacctttataccccaaaacaaatgctactgtacaggaggatctgagacaattccccctgatatattcaagctgatttacagcaactgttgctttaagacgttcaacctcatcgttgagtgtgctcctataagctgatttagggagactccgacttatctattttgcattggacaataggccagtaaatatcaatgtatcataaattttcattgaagaatttgtttctatgatttctagcaatcctatcattcatttaaatatgtgatttttttttgtatccacctatggctttgtatatgaaattgcatttccaattaacactggtatttatacacaaaaaaaaaaaaaaa

SEQ ID NO: 157 - DNA, 6745 bp, Xenopus laevis
ggaagagacagcagcgaagctcatctagtctgactgttggaagccaagagtcctaattaaatcagaagatttgagattgctactttacataaggctctcaatgcaaagagaagatgaaagacctagatttaggagtggaatatgtaatacccagcctgggatacagaaatgttcgggagcaacacaaccaagatgaaaggaaggagtcgcaggattttaagtaccaaaaagcaaagccacagcatgtggattgcctggatgcattagaggctgctgcacgagctgaaggactgccgctggatatctctgtgcattctaacttaaaaatccttgatgagggccaccacaaaggcaaatatcaccatggacgcaacctattaaaacccttcaggattacttcaaagcaccagcatcctgtggacaatgcaggattattctcctttatgacattctcttggcttactccaatggcccgattagcttacaaaaagggagaactcttctttgaagatgtctggcctctgtcaaaacacgaatcatctgatgttaatagtaagcgtttggagaagctttggctagaagaggtgactgaaaagggtgccgatgagtcttcactccgcagcgttgtctggaacttctgccgcactagactcatcatctccatcatgtgcctgatgctcactcaactggcaggcttcattggcccagtaagtaatttccaccctgtttcaattgcccagtcgtaatatggtccgaggggagtcttcaaatcccccaccccagcttgaggtgtctctcatgtaatagggaatggcatgtaaattcctccctctgcagagatctgagtacaaattttatctaaatttcatttgattacactaaaaagttgatatcaagatttgatatatttgaagtttagctttatacttcatttcatttggagacacccagtagtttattttggacaaataagtaaactattttttggttactgcatgtctatgccaaaagatggtctagctaagattgttgggccagtaagtggtatagtaagttaccacgtataactgctacatttaggccactagtttaaagtgtccattgtatattatgtatttataaatatagtttaataacctttactacaacttaattgtcctgttacattataaatgtataatcccatttactaaatttttactttctgcaaatttgtcttgaggtgtaggaactttttactgcttgtagtactttaatgtcagtttgctgttttaaagctggaattgcattgagtgggtaagtactaatggggcacactgtccaggttaaaacgagtaaagcaaccattaaaatctgtttagctacaattatgatccaataatataaactgttcttgttcttatattagtaaaatatttttttatgtatgtcaacaatatggcatcataattaaaggtaaaagcagtgtaatattttatgtgatattttttttttttaatcttatggttgaggcctaattctagtattgaaatgttaaggctgtaacaaaacaaacttcattaagaagagcttctgtcattgttacgctacatgggcgacgaggagtcacaagtaagattaagttgtttaattgttacatttttgagttctaaaactaatctataaggcaagtacaaacttaacaagtagacagataatttccctttggtagttaatatccacactacaataaaaatacatagactaagctcccattataaccctgggcttgcatttaggatgtcacatgagactaatttattaatgctagctttacaattgatatacttcactttgtggtaatgaagtacaacttgcccactttccctttaaactttaaagctttaaacttcctatagtcttgtaatcctgctgtaataagctaattgctatgtaatgcatatggatagtgctttggtagtgtccactctgtattataattttaatacacataggataatgttcacttaaaggcacagtataccccttttgtccaccatgagttgtatgaataggacttgtgctgaacataggttttgtctattgttttaacctcaggtttgcatgaaagtgggttttgtaagcatttccagaaaaaaaatcttacatgaatgcaaatttgcagtttttgcatgttttaagaattattattttggtgaaggaatattttgcttgtcccaataagtatatatttagacttttcactgttaaatgatgtcttgctttactaaagactatgtaacagaaaataaaaagactgttgttttgcagtaaggaggaatagaagccacttgtaagtctgccttttacactagtccgtattaatgatctactgtaggataaaaggaaacactgcatgttggctaatatggctgctggattaaggaaatgttgggcatgtaatagtgaaagattgtcacttgccaccagcaatacaaatattatttattgtatcctagatgtttggttttttggatgtcttctgaatgcttgtaatttgcagtctttttttgtgtcagagtaattaagcattttatatctggttatcgctggcatgcatcacaatgtgtaaaggccaataaatgcataatttgaattcagtagcactgtgatgagtttactttacaactataaagtgtaggtggagaatataatttagtttgaaaccttttttggctgtaacaggaatatcaaaatggaaatattgcatgacatttcctcctcaaataaaatatatattgtatgggatttttctaggtatgcaccaaattcactatattagaatttggctgaatacaaagtagtgtttggattcggtattcagcaatatctttcacaattctagcgaatcctggattcggtgcatccctagttttttcaggtaacttaaagtgatctgtcatttccggaaggttaattcatataatagtttggatgtgcagatatatctcttggtgctatttcaatgctccagataaaattgaggtttacaaatgaagcatctcctaaaaatataaactatacaacttggtatgttgtaccctcagttcagtgaatcttaacttatgagttagctcccaaacttgggtgggtaaaattctctgttagaatagacaaaataatttcaaattaaaaggtatagttaagtctgtaaagcattggtaaaggattgacttcaaactttcttcggggaccctgacaaaaaggttaagaaatccaaagaataggttaatttagggcatcttaaatgttttagccacatgtgaacttccagcccagagtcataattgcagatctttattttaggcttttcatgtaagggatctttatttagttaaagcactaaaagtggaagttcatcctaatctagaatgttatacagatggagtaaatccgatgagcttggcaactgtccacattttacttgttgaatatcacatttttgactatcttaaaagtaagactaaataatgctctcttctttcagccattccatggtcaatcatttctcctgatgttccaaggagtgctttttagaatcaatgatactcaaacagatagtttaatggggtagttcacctttaagtttacttctagcatgttatagaatgtcctattcttagtaacttttcagctggtctttgtttcctttttgaattattggcaatccttttctgcctctttccagtttaaaaaatattattgtattactaatatttcttttgagaccaccttctatttattttccaggctctcactctgcaaccactgcctggttgctagggtcacttgaagcttagcaaccagatgctgatttttttttttaatcagtctacatcatagtaaaagttgatttgaatgtgaactaaccctttaaaagacaaattaaagaacagaaatgggaaaaaataaataaaatgcagacagttcatattagattgtctccatcatagtatttattttaatatggtgaacttcctctttaatacatttttccccctccccctttttttgttttttattttattttttttaaagagtatccctttgctaaatattctgaaggatagtagataaaaggaggaggctatactaacatgtttcccgaatgatattgtttgtctttgttaccaaatgatccagcctctcccattgtccaagtgagacgctggatagttgcacgggtggagggtgggaaggtggtcatggcactaacgttacctctgtagtggaaccaatgacagaagctgttctttagaatttccagggtgtcaactctacgtgctgattgagccaggcaagctgtgcagaaaccctcgaagggcaagatgaaggtaaggtcatatttattccacgggaatgctttcagccacaagaagcttacatctatggtaacattaatcagcagtactactcccatttaactcttaagaacgtaatgttcagcattttttatttgctttttatcttatattttgttttttatcttttatttttgtaattttatactgcagaaaagctgaaatttgaatgcttatttcttttcccttccctctctgtcttttgccacttattgagggagtgatttatatagaaaaactttctgtaccttaagaattctgtggtataaaggggatgttttttttccattttgttgttttctatgtttgttctctctctgtgctagtgttttactggtaggttggctcatcttctcacagtagctgtatttacaagcaggtatctaagagtcagtgttgctttacaaaacccagatatacagtgctaatctctgccattcccaagttttgaatttctctcaaaataatcatgagctgcagagagcccttcagaaccaaatcctctagcatgattgttgatttgggctactcctaaggacatggactcaatggacttctgttacacatgataggccaggcaagctgggtaacatcagctcaggtctgtcttcactggctactgatggtctgtccaagcttttcacctgtgctgggagcatgtcaagtgactgcctggccgagctctacagactgatgaaaaaggactagaagagactttttttcagccagctttatcttcttaatcatcttaggctcttcctgctgatcatttatatttgcaattattcagtttatttttttatgaccttagttttcatgcgtgatacagaaaatgagaattgagttacagaaaagaaaaacatgctgcaaataggaattctgaattttgctgaaatgccttccccaaaaagaatacaggtttaaccattatcatgagatgctgtgcaagctactttgtatatattatgtacctttatcttctgaattgtatgtcaatgcaaatctattttgttatggaaactgactgttgaaatgtttagtcgtatgctttttccctccccccgaataaaattgcgtttttcccctaagttcatagtattttataccattttttaaaaacctctccattctcttgtgtcttgtaaaaatcatgcttgtacttatctatttaaaagacaaaaatatggaattttaaatgtcaaatagatagaagtacacagaatatgcacaaataagaaggaccacgtaaaattaacaccatagctttcgttgcttttttctgctccctattttattatatttatttaactgctgatatttattttcaggaatttattgccaaaatatccttctcttccccagtacaactgtaggcgtttgtagtgaaaagccttttggaatacactcaacaaagcagtacggacctcgtttacagcttgcttttagtgtttgcgttactgatgacggagatcgttagatcctggtctcttgcgctcacgtgggctttaaattatcgaactggttcgcggcttagaggtgcggtcttgaccatggcttttaagaagatcctgaaattgaagaatattaaggagaaatcattaggagagctgataaatgtctgctccagtgatggtcaaagaatgtttgaagctgctgctgttggcagtttactggctggaggtcccattgttgccatactagggatgatttacaatgtcatgattctgggacccactggtttcctgggctctgctgttttcattctgttttaccctgctatgatgtttgtatcaagactcactgcttacttcaggcgcaaatgtgtgtcggtaacggatgagcgggttcaaaaaatgaatgaaattctcaactacattaaatttataaaaatgtatgcctgggtgaaggccttctcccaaaatgtgcaaaaaataagagaaaatgaaaggaagatactggagagagccggttatttccagagcatcactgttggaattgcacccattgttgttgtcattgcaagtgttttgacgttttctgtgcacatgatgttgggatatgacctaaatgctgcgcaggcttttacagttgtcacagtcttcaactctatgacttttgccttaaaagtgacaccattctctgtgaagtctctatcagaggcttctgtttcaatggatcggttcaagagtctatttttaatggaagaggttcacatggtaaagaaaaagccatccagccctaacctcatcatagagctgaaaaacgctacattagcgtgggacacttcctatgccagtaaccagtgctctccgaagggcacccccaaattgaaaaaaaaaaaaaaa

SEQ ID NO: 158 - DNA, 3493 bp, Xenopus laevis
gctctagcgctgcctcctcctgcctctctcatcctctcagctcagcatgtcccaaacgggccacatattgcgatccacgaatgtggtttaccagtcgcaccatgtcagcaggagtaaaagagggcaagttgtgggcaccagagggggcttccgtggctgcaccgtgtggctcacaggtctctccggtgctggtaagacgaccttaggctttgctttggaagagtaccttgtcactcatgccatcccctgctactctctcgatggtgacaacattcgccatgggctcaacaaaaacctgggcttctcctcagctgaccgagaggaaaatatccgacgtatcgctgaggtggccaggttatttgcagacgctggtctggtctgtatcaccagcttcatctcaccctacaccaaggatcgtgaggaagcaaggaaagtacacgaatccgccggccttccgttttttgagatctttgttgatgccccgctggatatctgtgaaagccgagacgtgaagggtttgtacaagaaggccagagcgggagaaattaagggattcacaggaatcgactctggatatgagaagcccgaggcccccgaacttgtgctgaaaacgaatgaccactctgtgaatgattgtatccagcagattgtggagctgttgcaggaacgggcgattgtcccatcgggagctacaaaagaagtccatgaactgtttgttccagagaacaagttggatgaggtgaagcgggaagctgagactttgccgtcagtagagatcaataaggttgacctccaatgggtgcaagttctgagcgaaggctgggccactcctctcaagggcttcatgcgcgagagggaatatctgcaggtccttcacttcgacattctcttagatgactggaaccataacttatacctcaagtccaatggaggaaccattaatatgagtatccccattgtgttacccgtctccaccgaggacaaggaacgattggccaatgccgaatcgatcgctctcaaatacaagggcaagaatgtggcgattttgcacaacccagaattttttgaacacaggaaggaagagcgttgcgcccgagtttggggtaccacttgtgcaaagcacccccatatcaagatggtactggagagtggtgattggcttgttggtggagaactagaagtcctggagagaatcagatggggagatggattggaccagtaccgactcacacccctggaattaaagcaaagagcaaaggacatgaatgcagatgtcgtattctgtttccagctgcgcaatccggtgcataacgggcatgcgttgctgatgcaggacacccggcgccacctgctgtccagaggatacaagtgccccgttcttctgcttcatcccctcgggggctggacaaaagacgatgatgtgcctttagactggcgcatgaagcaacatgatgccgtgctgaaggagggggtcttggatccgaagaccaccattgtggccatcttcccatccccaatgctttatgccggacccaccgaggttcagtggcactgcagggcccggatgatcgcggggtccaacttctacattgtggggcgtgacccagcggggatgccccacccagaaaccaagcaggatatgtacgaagtgacgcacggcgggaaggtgttgagcatggcccccggcctgacatcggtcgagatcattccattcagagtcgccgcgtataataaaaagaataaagccatggagttttatgacaaagaaagacacggtgagtttgacttcatctcgggcacgcgcatgaggaaactggcgcgggaaggacaaaacccacccgacggtttcatggcccccaaagcctggaaggtcctgacagattattactgctccttggagaagaactgttgactctgaagcctcggttggagacgttgtagccgagttattttatatctaacaattctattatatgccaagtagtacacacattttgttttatccttgttccttttaagagatctttttgtactttataactgaaatgagccagcaatgtgcaatggaatcgaaggcagaaattacaggtcacagccttgtcgtgcccaagagcttacactcgtctattaattgtgctctgggacctgtcatggctaaaatatctctttatatgtgaattcatggtacagtggagtatgaagaagctccagctacatatacccgccatgtgctgtcattgtgcagactaaggagatttgggctaagatcctattattacactttagaatatgaatatatgggtagcataagcgggaaccagtacatattgcatctacatgtgcttgggctgtgccttctgctccaaatgttgtgccaaaaatgtaaaagaatagtcacgccacctacaggagagcacggagcagtgcagctccaatttaatggaagcctctgtttccaggatgaaagtggtggcggtatcactttaaggagatattgacgagcctaattgtgaatgttacaagatcatatacagaagtagcaccaagttcatcccccaataagaaataaatcagttataaataaaagcagcacatgccgacccaaagcaagtgccatccatatttatacatttcagctgcagcacaaaccgacctcaaaccttaaaaaacaccaagccagtgatttcaatttaggatatttagggtagcttcttaattcttgcgcctgatttctatttgcttctattcttaaaataaatgtaataaatgtgtattcctttaaatgaattcattaaaacagggtaatcggagaaatgacgtggaatatttaggctccagcactaaagtgatttttgctttgctttgttcttaccccgcgtccagtaataggcgaaaatgctttaatacgagatttatttttattattttttatcattgtgtgaattaatgaaaccaacttgtgtgtaacaatggaccaaatatgtgcccccactgtctgtgcctttttgaaagggttaaattgtgaatttgatgtttggaattctcttaattaaaggtgggtcttaatgaaagggatttcagccaatggggaagcagctgggaagtcattatttcataggccacatgggggcgatatcacacacctcgttgttgacagtttataggggattcctatagggggcgacacctttgcctaattctgcaatagaatttctcataaaactctccatgaaggacacagtttgtgatacacagtaataatgcagaacctcttgctttgtacagtcctttgattacctgcaataattggaataaattttgtagctgatttttttttttctttttgtaaagaaatctatttatttccggacaagacgggactcttgtgtctttttaaacgattgatatctttatgcttcataatgtgcccatagatgcgatacgaatgtatttcatatagaataaatatttcttatttaaaaaaaaaaaaaaa

SEQ ID NO: 159 - DNA, 3291 bp, Xenopus laevis
tagaaggcagagaaaagctacagctgcagcattctgagcaccaatactgacagatctaaatactgattggaaaagatttcaaaatgaagattgccattattggagcaggaagtagcggcctgacttctatcaaatgctgtctagatgaaggtttggagcccacctgctttgaaagaagtgatgatattggtggggtctggaggttcgcacatgaggtggaaagtggcagagccagtatctatgagtctgtggtcagtaacaccagtaaagaattgatgtgcttcagtgacttcccttatccagagaactttcccaattaccttcacaactctaagatgctggagtattacaggatgtatgcaaatcattttggtcttctgaaatatatccagttcaagacactggtcatcagtgttcggaaatgttctgattttgccagcactggacaatggagtgtcacgacagaaaaggaaggccagcaggaaactgccgtctttgatgctgttatgatttgctctgggcatcattctgagccacattttccactggatagttatccaggtataaaacagtttaaaggccaatatttccacagtcgagaatataaaacctctactggatatcaagggaaacgtgttgtgataatagggatgggcaattcagcaactgatatcggagtggagctcagccggactgcagctcaagtatttctcagcacaaaaagaggatcatgggtaataaggcgtgtgtctgataatggttacccttcagatgtcttggcaaataggcgctttcataactggatgaggaacattctgccttcagatcttgtcatgtggaacacagagaaaaaatttaatcagtggtttgaccatgttaactatggcctgcagccaactgacaggagccaatttaaagagccattattcaatgatgacttgccaagccgtattacttgtggatccttgcttgtgaagacatcggtgagagaaataactgaaacagcagtgcagtttgatgatgggactgtagaagaaaatattgatgttatcatctttgccacgggatataattattgctttccatttctggatgaatctgttataaaaatagacagtagcagaacatatttatacaaaaatatcatccctccaaacttagagaaggctacacttggcatacttggacttattcagcctcttggacctattatgccaactacagaactgcaggcacgatggataagcagaattttcaaagggttgtgcaggttccctccgataaatgaggtgatggatgaacttgaaaaggacagaaaaatcttcatcaaaagatatggtacaacaagagagaatcgtttgcaagtggatttcattgaatacctggacagcttggcttctgatattggtgtcaagcccaatattttgcgtctgtttctaactgatccattgctagctctggctgtctgttttggaccatgcacaccagctcaatttcgtttgcaaggcccaggaaaatggccacaggccagaaagcaaatcatgaccacatgggatcgtattataaagtcatcaaagacacgaactgtgaaaagccaagggccaagatttgtgaccgctgctcttctgttggccattctttgccttgtagttctgctgttgtctattttcattaactaaaaataattcaaataaggtatagagtattccatacatatatatatggaatcatttatttgttattgtaaaatctgacgacatgcacaatttcgacaaatattattgtaaggcacacgatattattctgaagtagtttgaaccagagaggcaaatgcacagatcagtgttggtaaaatatacacagatacttcatataatctggacataattacacattcctatagatttatatatatataactagacgaaaaaaacgcaccaaacagggcttagtataaagtccaaatatcaaactttattttcaatgtttcggctccatagcttgagccgtcttcctgtatatacaggggcggaactaccgggggagcagggggtacaccccctcagggccccccggcagtccgcgcgccgcgcatattccgggccagttccgggtttacggaggggggcggggggcccagctgcgtgtcctgcgccagggcctgcccccctctagttccgtctctgtgtatatataaccgtaaactgcaattacattccattttagtaactactataattaataagctagttcaggggactactaatgtatacattaagaaaaacatttgatttttgcaaaacatattcatttggtctattattgctcttagttcgacactgaattgttattttgcaatgtttgattataaaaccgttgtttaattaaggaccaccataaaattatgtttacgctattgcagtaagaaacctccatgagctatgaactggacagctttttttcaaacgatagtaataattaggaaggaatcaattactaattcatgttttctctgttgagatgtataagcaatggggatcaatcacaagccggaagttatcaaatttacattatttatctccatgtaagagaaccaaccttacaattaaaaagagaagggaaagttccaagccaaggggagtgttttaattgtggttctatgagtctctcggaattaattcaaacacaccagctacgtataagcaaaggtttattacatacatagaatgaagaagatatccattagtatatgagcaaagcaccttcaatctgcaaccaagactgggagatcctggaacagtcagcagatagaatccctcaaacggagcacggaaggtcctgtggtggcacgagtcaactccacaagtgagatctcaactgaccgaatggagacccccagtttatataggcttagcaaaacatgagctcatatagtaatttagtaagaagatacaatgatttggttaataacagatcttgcttcccatgcgtttatcaggatctggccagactcccaaaaagcacatccgaagcagagatcttatcttagctagctggtagctgaatagcatattgtgcccctatctatagtaaagaagagtctgataagggattcagaaatcataagcatattagataatacatataagaatatccagaataaaactgagttgttagttcccatgaattctcttgcacaaagcttcattatacagaattatagataataatgatgtatactatgatataaagctttgttatacacaattaaacatcaaaaaaaaaaaaaaa

SEQ ID NO: 160 - DNA, 2398 bp, Xenopus laevis
cattcaactagaagctgcacagaaagggagaagagatggatccttctactagccagcaacactcaagtacccaggatgatttgtctgaggccttaaaagagacaacaaaggaagtgcacgttcaggcagaaaacacagaattcatgaggaacttccaaaaaggacaagtttccctagaggagtttaagctggttatgtcatcgttgtacttcatctacgatgctctggaggaagagattaacagaaataaggataatccagtcttttctcctgtttatttcccactggaactccatcgtaagaatgcgctagaggaagaccttgagtatttctatggtccgcagtggaggaaaaagattatttgtcctcattcaataaagaactatgttgacagacttcaccatgttggccaaaaggagccagagttacttgtgtctcatgcgtatacccgttatttaggagacctctcaggtggacaggttcttaaaaaaattgcacaaaaggccctgcagcttccagccagtggtgaaggtttagcattctttacctttgacaatgtcactaatgcaactaaattcaaacagctataccgttcccgtatgaactccattgaaacaaatacagatactaagaaaaggatattagaggaggccaaaacagcattcctgcttaatatcaaggtgtttgaagaactgcagaccctatcactagcatcttctcagattggtaacaccaggactgatgcaacagaattacgaagcagaggacccaagacagaaaatggtagacctgcaaagacagaaaacaacggttcctcagaggagcagcccacaacattacttcgctgggttcttgttgctggctgtgcactcatcactctaatgggactatatattttctaagaaaatggctcatatcaacagtttttactctttacacaaggtccaggattttaaatacatttcaagtgtgaagacacttcagtttcaagattataaacacgacttgactaacaatattcagatagagggtgtgttatatgccttgctgtctataacacttatatcggactcatatacgtgggccgaatagcagctatctttggattcctacaatacaattaactcgagtgctactgattattctatggataccttatctcatatcaactacagatctctggtttgtgttaagcacttatttagcttacagttactgtatagggatgcatggttcccacttctaagtaaacaagcagggcattattgaattagtgtggaagtagtacacaaggtgcttctaatacttgtaatggtttgctttattgattctgttgtatgaaacaccactttgcaaagaaaatgattttttcggagttttcacttgaaacctcagatttttggccgaaacctccgaaaacttcagggtttggcacaaaacccagcgcacatcaataaaatcattgggacttctcccattgtcttatatgcaacctcgacaggtctgagatgccgggatttacgatcctgagttttccagccttggggtttaataaatttcgaaaaattaataattttttaaaagccagattttataaaaaaaaaaatcacacatttttcatgatttttgcattcgaggcttagtaaataacccccctatagttaaaaaagagagaatatggctctatatacatgtagaggcacaacaaaaatgaagcatagcctgatccagtgattagggctagattctaacatcacaaacaacctggcactctatgaagacaaaatacgaattttactgtacaagttaacatgtaattattccaagagagcttgtaacactcatgtggcctgtttattctgtcagttacagcttccttttctattttggtttgcactttaaccaaaataaaaaaaatcatctgttgaaacatttaaaaattgtacattgctaaacaaacttttgaacccatatcatgttgttcagccttaagaaaaaaggattttatacatgttctaactattatacaaaaatgcagaggcttagtctcatgtggaattgctgtcaatcttacttagcaaagtaatttggttttgttctgtgctcttctttacctcactgctggagcagtgaattactattttgctcatttatgttacattttacattatcctgtgacaaataccatttattgactttccaaagttttccttaagtttactttagtcttttattaatcatattaaacattatttgtattttgttacaaaaaataacagttctgtaatttttaaagttgtattgtgcaaaacaaagaatcagaatgtataatttatatttttatactaactgcgcaataaaattttgctggtcataaacatgaaaaaaaaaaaaaaaa

SEQ ID NO: 161 - DNA, 1293 bp, Xenopus laevis
gatgactgtatagaaggactccgcaaaccacctgacttataggaactcaaatgcaaagaggttatgaaagcccctgagcatttaactactaatgaatgcagacactgatggacatatatctcttcatacaactgcctacagtcccagaatatatatatttatagcatgatcctggatcttacagcattattctgaaagctatggacatagagtttgctggagttcccattataggcaaattgatattctgaatgcaagaattaatataaattaagacgttaataacccagtactcctggagctgattttagtgaaggcctgcgctgtgtattacaaggcttccccacatggctgtttggatcaaatggagtttttggatactgatgctgaagacattcccattgatagcatggggggatgagcaggaccattccctgaaacaggtcctgttttgtcagccacagtccccatccccagttctgttgaaaatgtttgacgaagagcagatgttccagtacaattttgcagataaatctgttgtacctcgtatcccaaacttaaagaaatgggccaaccaggatcttttctccaattcttcagaccttgcgtttgatatacagttgtgcacagaggccatgcaaaactttacccaagctgttgtgaacattacaccagagactaaagggatattggatataaaagtttttacattacatccacttaccatagggaagccaaacactctggtttgttttatcagtaatataattcctcctgacctgaacatcacctggaggaagaatggcattttgttgacagaaggaatcagctatacaggttattttgcattgagcaatatcgagtaccagaccttctcctacctcaatatcactccgacgtatacagacagctatacatgtaatgctcaagagggaagcactacagctgttgcatactgggtttcagaatacccgaccccctctgagatactggaaaatgttctctgttacttggctattgctattggcattgtgttcctctttctggggcttctgttcctctttttgacttggaaacaacatagaaatgattgaaccgatgacactttccagagttcatgtacacctacaggatgccatatgtttttctgctccctgcaaattattgtgcttttctgttgtctgacgccttaatttaaattcttgggagattttttaaaataaatcctgtaccaatctactgtaatattagattagattatttaacacagattgttagcaaaaaaaaaaaaaa

SEQ ID NO: 162 - DNA, 3088 bp, Xenopus laevis
gtgcatggggagctcgggctgcggtacacaggcagctcctacacacccagaggtgctgcagatcattgtatgactgaatcatatctaggcaggagagaacctcaactactttcaagatccaccatttgtgtctggactcggcacggaaatggctcggattagtgtccttgtcttgactgcctgtcagctggtgcttggacttcttactagctcattaactgactcctcagctccaactaatgattgcccccagctctgtgtttgtgagatccgtccatggtttacccctcagtctacataccgtgaagccacaacagtggattgcaatgacctacgtttaacaaagatcccagaaaatctctctttggatacacaggtgcttctcttgcaaagcaataacattggtaagaccaacggagaactgcaaagactggtcaatctaacagagctcgacttgtcccagaataacttcacctccatccaagatgtgggcttgtcaaatcttagccagctgactactttgcatttggaggagaatcagatttttgaaatgactgactattgtctacaggacttgactaacctgcaggaactctacattaatcacaaccagcttaattccatctctcctagtgccttctctggactgcgtaatctactcaggctgcacctaaactctaataagttacgtataattgacagccgctggtttgaatccacccccaaccttgaaattttgatgattggagagaatccagtaattgggatcctagacttcaacttccaaccgcttgttaacttaagaagcttggtgctagcgggaatgtacctaagtgacatccctggaaatgcattgctgggtttggataacttggagagtctctcattctatgataacaaacttggcaaagttccccagcttgctctgcaaaaagtgcccaatctaaaatttttggacctcaataagaaccctattcgcaagatccaggaaggtgactttaagaacatgctgaaattaaaagaacttggtatcaataacatggcagagctggtgtctgtagatcgctatgcactggaaaatctccctgaactaactaaattggaggctacaaataaccccaagctctcttatatccaccgatccgcttttaggaatgtgcctacccttgagagcctaatgctaaataacaatgcactgaactctgtgtatcgtgggactgttgaatccctcccaaacctgcgtgagatcagtattcacagcaacccactacgatgtgactgtgtcctgcactggatgggttctaaccaaaccagcatccgtttcatggagcctctgtctatgttctgtgctttacctcctgaataccgtgggcagcctgtaaaggaagcgttagctcaagaccctgcaggagagcagtgtctgcccatgatatcccaagatacatttcccagtcatctcagcctggacatagggatgacaatttcactagactgcagggcaatggcagagcctgaaccagaaatatactgggtgactcctttggggcataaagtgaccacggaaacactttctgacaagtaccgcctaagtggagagggcagtttgcagatctttaatgtgcaggttgaggattctggacggtacacatgtgtggcacagaattctgaaggcgccgatacaaaggtggccacgctgaaagtaaatggaaccttgttagatggcacccaagctcttagactttatgttcaacaagcagaatccagttcagtcttggtatcatggaaggttagttcaagtgttttagcttctaaccttaagtggtcatcagccaccatgaagattgataacccccatatcacttatacagcacgtgtgccggcagatgtccatgagtacaatctcacccatcttcagccagccactgaatatgaagtgtgcctgacggtgtctgggctgcaccaacaagctcagcgtgcttgcatcaacgtcactaccaaaggcacgtcctactcaatgactgttactgatcaggaaaccagtgctgccctggctgccgtcatgggttccctatttgccctgataagttttgcctccgtttctgtttatgccgccaaaaggttccagagaaaaaactatcgccactctttgaagaagtatatgcaaaaaacctcatccattccactcaacgagctctatcctcctctcataagcctgtgggaaggagacagcgaaaaggagaaagaggggactgcagaggcgaaagcttcccaggtggacacatcccggagctattacatgtggtaactctcacattggagacccaacaacagagcacaaagactgatgaacacctttcagaagaacttcttttccttttattttatttttttaaccttatgtcactttttctctttatcccagtctacttctcttctactgtttcccttttatttgaattgatgtacttttgttttatatatatagctatatacactgtctgggcaaagtaggaccggtaattaactatccggtggtcccttctaaatgtaaccccctactgttcaatataaggttatttctagggatgggcgaatttttttgcctcgttttgcctcggaaatgacggccatagacttgtatggtgtcgcgcgtcaaaaatttttagactttaatatggacgtcggcaacatttcacctgcggcgaatttttgacgaaactaaatgggtcaaattcgcccaagcctagttatttcaagtcactgagaagttctttaatcatattaggacaaggaacaacaagctaagagtttttttagaggtcacagaaccagctgtggtggccttatctagcattacatgggtaccacgtttgctgttggttctcgattaagctacctaccctggagtctttatgattaaagtgtaattttccttaactccgaagtggcttaaagggattgttcgccttcaaacactttttttcagttcagttggtttcaaattgttccccagaaataaagacttttttcaattaaaaaaaaaaaaaaaaaaaaaaaaaaaaaaaaaaaaaaaaaaaaaaaaaaaaag

SEQ ID NO: 163 - DNA, 4049 bp, Xenopus laevis
cgtcgaaaccggtttctagcagaggggcttctcctcttctgccgccttcctttggagtatcatgccctgctgctgcgggcggggagggtgacaatgccgtttcctcttgcaagccagggatcacagcagtcacagaagacctatggtattacttcacctattagtttagccacacccaaagatactgattgtaccctaacgcaaaaactaattgaaaccttaaaaccttatggagttttcgaagaggaagatgagttacaacatcgaattttaattttggggaaattaaacaacttagtaaaagaatggatccgggaaatcagtgagctcaagaatcttccacagtctgtgattgaaaatgttggtggaaagatttttacctttggatcataccgattaggtgttcatactaaaggtgctgatattgatgctctctgtgttgcaccaaggcatgttgatagaagtgactttttttcatctttttatgagaagttgaagcagcaggaagaagtcaaagatttgagatctgttgaagaagcatttgtaccagtcattaaattgtgctttgatgggatagagattgatatcctatttgcaagacttgcactgcagactatacccgaggatttagacctccgagatgacagcctgctgaaaaatttagacatacgctgtatacgtagtctgaatggttgtcgagtgactgatgaaattcttcatttagtaccaaacatagacagcttcaggctaactctcagagcaatcaaattatgggcaaaacgtcacaacatctactcaaacatacttggttttcttggtggtgtttcatgggctatgttagtagcaagaacatgccaactatatccaaatgcaattgcatcaactcttgttcataaatttttcctagtgttttcaaaatgggaatggcctaatcctgtgctactgaagcaaccagaagagtgcaatctgaatttacctgtctgggatcctagggtgaatcccagtgataggtaccaccttatgcctataatcacaccagcctaccctcagcaaaattccacctacaatgtttctgtttcaactcgcgcagttatggttgaagagttcaaacaaggcctggccattacagatgaaatcttgcttcttaaagcagagtggtccaaactttttgatgctcccaacttctttcagaagtacaagcattatattctccttctcgcaagcgcaccaacagaaaagcagcgtctggaatgggtaggcttggtggaatcgaagattcgcattcttgttggcagtttagagaagaatgaatttattacactggctcatgttaacccccagtcattcccagcaccttctgagaactcagaaaaggaagaattccgtacaatgtgggtcataggtctagtgtttaagaaaatggaaaattctgaaaatttgagtgttgatctaacttatgacattcagtctttcactgacacagtgtaccggcaggccattaacagcaaaatgtttgaaactgaaatgaaaattgctgcaatgcatgttaagaggaagcaacttcatcaactgcttcctagtcatgtgctccccaaaaagaaaaagcattcagttgaaggtgtaaaactggtatctctgaatgacagcagcattgatttatccgtggacagtgacaacagcatgtctgtgccttctcctaccaatgccacaagaaccagtccactaaattcttctggattgtctcagggaaacagcccagcaacgccagtatccctttctgtgaccaacacccaggctactgatgtaatggtaccacagaataattccactgaaaattcagggggtagtttgaatgaaagcattcctgaaactgccacacacccagctttttcttcaacgccaagacctttggtgactcgagttgtttcttccatgcgtttggttaaccaagttcaaaagcctgtcacaaatacggtaacaaaaatgcctagtccagtagccggtgtgaaaaggacatcatctcctacaaatgaagagagccccaaaaaaaccaaaacagaagaggatgaaaatgatagcagtaattccacagaggtggatgaacaaaacaaattagaaactgaagaactaaaggaagtacatagtgaagaaaaatcctcatcccctgttccaggtgcactgccatcctctcagcgatcatcaagtacagatctgtctgatatttctgtgctccccgctactcctattcctgttatcaagaattcaataaagctaagactgaaccgataaacacaatctcctcagggtccacaaacaatgtccactagttgagctattttcctgctgcgaggcctaaactgcggagtgtagcagggcacgtcactgacagtttaggcttatattatgaacgtgtcctgggctacaggcagcctttctggaagtccaggttagtatgatgagaataaagtgctattaatgtgctggcagcaacgaccgtttgacttaactaaaggactctattccctttaaagaagagatgaaaaatataactgcatttctgtctgtacttaacattctgactgaaataatggattgtacatttgcaaaatacaactggcctaaaatctttcagctgacgcacttttatgttttattgtagcagtcgttaggaacttttagatttcctttttattttaatttgtgacttcattcatttatttgctggaggtctgcatgacggatcacaacactggaagcatcttttcatgagttaaactgtgtcttaatgtcacataagagatcattattttagatctatggaaattattaggggttctctttacatctaggtttttaaagggttttgtttcaataataccttaagaaggatgagctatccattttttttcttttttagaacaacgttttcactatgcccactcgtttacaaaagcagtgtcctgcgaatgcatgcttccttatagattcataattctcttagggagcaaaacccatcagtagaagcttgctgtgttctgatcaacaagtctttgtctctttttgttaacagttaggctgtagcttataaaggcctttatcatcacattaataagatggcaggctagccatatatatataaatatatgtgtacaaattataaccatgcgtttaacatggtatttatatctggagaagaatcttgcaattcattacagtttttatttaagattattttagaatgctaggtaagcgctggtgaatgtgcagtttgcacagtagtaacattaaatcccttagctgtagcattaattcataatccactcttctatgttctgatttattcccaactgctcaaaaatgtgactttagcaaagtaaaaaaaaaaagggggtaccagtgcctgtagcaatgttagagacgggaaaggaggggatacttgggaagccgactatgaacttttattactccccctttcaatttcatcacatttccacattatctcacatgtgtacagtttcagtgttgacgtttaaatcaactatttgaaatgttcccaatgtaaatttatagaactagtgtgtttttatggacttgcactcctccaccaccaatactacacagaatgagcaatgcaggtcacaagtgtatttcttgtagtaacgcaatgtagggccatgacgtaaggcacaaaatgggtatagtcctctgtttacacacagatattcttaggtgtccccacaccccctttttccttaaatttgtttcatattagttaagctagattccttataacacatttggcttccccccctgtttctctccatgtagtgactttttatctgtagttttcattatccagggatcagactgttgctttcgcatgatgtatgtattgtctgatgactggagtttgctttgttttatagtacctgtactccttgtatttttcaagatctattttgtaaacagatgtatttctccattggaaaaaaaataataaaaaccagcacaactccatggtgcaaaaaaaaaaaaaaaaaaaaaaaaaa

SEQ ID NO: 164 - DNA, 1238 bp, Xenopus laevis
gtactaagagaaagccggcaataaaatgttttccttcaacatgtttgaccacccgattccccgggtcttccaaaatcgattctctactcagtaccgttgttactcagtttccatgttggcggggcccaatgaccgatctgatgtggagaaaggagggaagattatcatgccaccatctgctctagatcagctcagtcgtttgaacattacttacccaatgctcttcaagctgaccaataaaaattctgacaggatgacacattgcggtgttcttgaatttgttgcagatgaaggaatatgttacttgcctcattggatgatgcagaatttgctgctagaagaaggaggattgttacaggtggaaagtgtcaaccttcaagttgccacatattcaaaattccagccacagagcccagatttcttggatattactaaccctaaagctgtattagagaatgctttgaggaattttgcttgtcttaccactggagatgtagtcgccattaattacaatgaaaagatctatgaacttcgagttatggagacaaaacctgacaaagctgtgtccatcatagaatgtgatatgaatgttgattttgatgcccctttgggatacaaggaaccagagagacatacacagcaggaagaaccaacagaaaatgagccagaccacagtgagtatgctgtagaccttggatttagggcatttactggctctgggaaccggttggatggaaagaagaagggcattgaccccagtccttccccattaaagccagaagacattcgaagaggcattccaaattacgacttcaagattggaacaatcactttcatcagaaattcaagaccacaggcaaagaaggtagaagaagatgatgctttgagccgttttattgcattttctggagaaggacagtctttgcggaagaaaggcagaaaaccataactggctgtgggaagtggaaataaaatgaggttgcagtgtattggttttgtgtgtcatctgagaaattttagcaagttctgcaggaagtgtgttcacggatagtctcaaaggtccctgtttaatgcatgaagagctcaggcttacagtatgtggagcagggaccccctggtttatggaacagttctgcttgtctgacaacaccatacttgacaatcattaagccagaaataacagtgtgagccaagcaatcattaaaagcagacatttgaataacaaaaaaaaaaaaaaa

SEQ ID NO: 165 - DNA, 6409 bp, Xenopus laevis
gttatgtggcatcctatgggcagccgtgcggggacagagtagaaatgcgctctatcacacactgtgccactagaacataggcaataagccaagtacaggactgccggcatctgcacaacttctcatcagcagtttggcagttggatacctgggtgcaaagtagggaaccccgtgttaagaagcagcagcagcacctatgtcacgtgcggggagactgtcagtctgtaggacgagctgagagtgcaccgagatgacagtcaggatgctgggctctggctctggggctcctcgctgcctgttgcttctcctgctctctctctgcctgctgctgccatggatcctgggatgcccggtgctgatccacagctgcaagtgtgtaggggagaggtccaagcccagcctgagtccggccaatggaccgaggaagaaagtggtttgtaccaacgaggatctgtcagaagtgcccgaccctgccctgctgcccaacaagactgtcaccctaattctgagcaacaacaagataagcacaatacagagcaactccttttatgggcttaatattctggagaaactggacctgaagaataacctgatcagtaggctggaacctggtgctttcttggggctctctgagttaaagcggctagacctctccaacaacagaattggttgcgtaacagtcactgcttttcagggcctgagcagcctaaatcgcctgtcactttcaggaaatatcttctcaactttgaatgctggggtgtttgatgaggtgccttctttgaaagttgtggacttcaccactgaacatcttacctgtgactgccacttgcgatggatttcatcatgggccaagaatggcactgctcaaatttcagacaagactatgtgtgcttatccaagtgcccttaaaaatcgaccattaaggaatctgagagaaaaccagctgacctgcgaaaggaatcctgagcttcacacccaccagcttatcccatcccttcggcaagtcgtgttccagggggatcgtttgcccattcagtgcacagcgagttatttgggcaacagcagccaaatcatctggtaccacaatgggaaacaggtggaagaggacaaggacatgggcatcatatttgaggagaccattatccatgactgtatctttatgaccagtgagctgttactgtccaacattttgctgtcagccaatggagagtgggaatgcatggtatcaactgagcagggaaatatcagcaagaaggtggagctggtggttctggagacatctgcatcatactgcccagctgagagggtgtccaacaacagaggagacttcaggtggccccgcacgctggctggtatcacttcctaccaggcttgctttcagtctcccttcacctccaccttgctgaatggcacgggccaggagatgaaagcttctcgtagatgtgaccgttcaggacgctgggaggagggcgattattccaattgtctctatacaaacggcatcacccgagtgctctacacatttgtgctgacgccagtcaactcttccaatgtgctgaccctggctcaccagttgagaatgtacacagctgaggcagccaacttttctgacatgatggatgtcatttatgtggctcagatgatggagaagtttgttgggctggtggatcatgttagacagctggcagatgtgatgttggagatgaccagcaatatgatgcaggtggatgaccacatcttgtggatggcacaggttgaagacaaggcatgcagcagtattgtccagactgtggagaagattgccggcctgactcttagtagtaactctcaggacttgtctgtgagcactcgtaacatagcgttggaagcattcctcatcaaacctgaaagcttcattggcctcggctgcaccgcttttcagagaagagatgggcatcgggggggccaccgacgtgagaaggacaggaaggaacaagaaatagaatcacacactgaccagaggcttaagtttcgctgcacaactgggcacatcaatggttctctgcaccatttccatgttaagaataaccatgctttagctgctgtgcatctccctccaagtctcttcgcctccacctcctcttccacctgcaagctacaggtcctggctttcaggaacggaaagctattcagaagcgttggaaactcatctcggctcgctgaagatgggaagaggaggagtatttccactcctgttatattcgtaggaacaagaggttgtggcaataccaatttcactgatccagtaacagtcactctccggcacctggtgatgggatccaacccgcttcctgcccagtggaattttaaagccttggagggatatggaggatggagctctgaaggatgccaccttgtttctgagcaacccaacataactatcatgcagtgccatcagctaagcaactttgccatcctcactgagctgaacacatttccccaggaggctgaaaatggcactgaaatccttcatccagtcatctactcttgcacagcgattcttctcctgtgcctcttcaccacgatcataacctacatagtaaaccacagctccatccagatttccaggaagagctggcacatgcaactcaacctctgcttccacatagcaatgacatccgcagtgtttgcaggagggatcaccctgactggatacatcattgtgtgccaggctgtcagcatcattctgcattattcttccttatcaaccctgctctggatgggtctaaagtccagagtcatttacaaagaactaacttacaaacctcaaccaccgcaagaaggagagaccagccagcctccacagaggccaatgctaaggttctatttaattgctggaggaattccattaatcatttgtgggatcactgctgcagtcaacataaacaactacagggataacagtccttattgctgtttagtgtggaggccaagccttggtgcattttatgtcccggcaggattaattcttctcgtcacctggatctacctgttgtgtgctggaataaatttaagacgtcagccggctgaacaaaaagatgtgccggagacaaatgaccctccgcagcagagtggaggcatcagccaactactgagtgattcaagttcagtatctgtcaatattaattcagcagcacctgcggcagaggtggacaacgtatattgtttggaggtacagttctgggccttattgattgttcatattctctacatcgcactctgggggtttggagcttttgctgtgtcccagggctggtacctcaatatcattttcagttgcctttatggggtgacggcggtggttcttggacttttcatctttgttcatcactgtgtacgacggcaggatgttcagcggtcttggttcgcttgctgcccatcgtacacagaagctttgcctattgaagcatatgtaaaaactggatcccctgtggatgacccacctcctgtgtacagtggatgcaacacagaggtggcaaattcgatcaagtcttcatcctcgccaagcaacagcagtaactctaatactgggccctgcaagatcacaaacctgcaggtggcccaaaaccaagcggagagctgcccaccaaaacaagccagctgtgaagagagtgaacctgccaacaataaaaacatgcccgttcccagtaggtacatgaacaaccttcatactcgccggaaccataaaagtagaagtaagcagtatcgtgatgggaagcaccacaggttaaagatgcttcgtggaccctcgtccgatcagcattccagcgagagtggaagtattcacaatagtcactcagaaagctataacagcaggaacagtccattaaataatggcagacctgggggggaagctcgggaaccagagggggcaataactcactctgaagggagtgacagcagtgggcatcacgcacagaactttgccaaggcacaaaggaaaagtgcaagtcgggacaacctgaaacaggcaaacagcatggagcgggagtccaaacgacgatcctacccgctcaacaccgctaaccagaatggtgttctaaagggtagcaaatatgacattaactttgcaacacccgaaaactccacagccatgaaaactggcctttggaagagtgaaactacagtgtagcctttagtgcagggatgtgccttaaacctgatataaataagtgtcatgactccacacaaatgcataataggaactgggctctccccaggctcagctgactgcagattgctcagtggagatggctggacttctaataacagcaggagctgtgcccaggtgtctgtgtttggataaaggcacagccatggcatatgttgaattattcgtacatgcttgggagcactgccccctataggaatacagtttatagaggaatttcattctaatcatcacaggtgaaatcctcaaagatggatccatttcatcaccggtatataatggtcacaaccaaaatgatacgtcatcccaatcataatgcacttatcctgtgtcttgcactcagtcctatatggattccaagattatattgggatgtatggttattgctttgtgtataaggtatggagctccatttctaccctaaactaaggggtcaatggtgaatcactttctcagttatcaaatgtgccttattacgaacatttctggtttatgttcctactgtgcactttcaaaggaatggcctcgaggggaactctgggatgctgggaataaacacacgagtagccttcaagcgtggccttctgattcattaaaaacaaatgtacagttaggactgttaaaagcagacctgtttgccctgagctaatcctgtttccaaaacaatgggcaagtaaaatcaagacggacaatcaattgagatattcgaatatttgtaaaatcattttttgcatggtatgtttattgttatataaagcagaggaaaatgtttatttttcaaatatagaattatattgtatatatatatatatatatatatatatatatatatagatagatagaacaggatccatttttttcagaactgtatatttctgtattatgaaatttgttgactttttcccctctctcgaaagctgtaagattatatttgtaaaaactgtatgcaatggtctgtttcctctagaattgccaagagataagtaaactaaatgtcacgtactgtaagttcagacaggttaaagtgcctttaaaaatctgcaataagccaaagaactagagttagagagttatggaagtggccgtctagagattcattagcgccactcagtttttgctttcctgcttcactagtgttgggttgtttttgttgtatcccagaatatagtggtccaaatgaaatcatccagagcaataaaaaatagcacttttcattgtgtagcaaaggcttgtacaaacatggcttccatcaatatcgttttctgctcgctcaattaaagtgccatatgaactatatcaagagaagcagaaaataaattcttgtcgatggtctcaaggctttgtttgtatagatgagcatttacttgtacttaagtgggaataatcccatttcaagtgattatccctttgtaaaggtatttttattgcagagcttccctataaagttgattctaaagctggccatagctgttcagcttttattccttgtatgatgaacgttcggatgtcgattgattgttggttctttttaatgcaatgatctaaagctaaccatactgatttaaattgtgggattaaactgggaaaaagaacaaatcagatgatgttctggccattaactgacagacggcaatcgtacgaaagttacgtctgacaaatagtagtgacagtcacccattgatattgtcagataggcaatacatgaagggatattcttgttatccaacagaaattttctaacctgtccgatcgacatggtacgaaaatattcgggacgattataaagaatagacatcccccccccacacatccatccattttgctcatagagtgagcagaaagagaaaagaggttactagtaagtttttggcagcacctggaggttaatggaatgttccttcatactttgtgttactattctacaagtccatacaatgatccttaaaagtacttatcaggtgaaagcttttaagactagatggggcactggtttatcataggtcagacaatgggcaaaatgaaagttttccaccaataaagctttaccaaaatcaaatagcatgtaccaaagaaacaaagtccaaagcaaatggtgtaatctttgaatgcaccagaagacatgtttaaaacaaactatatattaaatgatttaccaacaaaaaaaaaaaaaaaaaaaaaaaaaaaaaaaaaaaaaaaaaa

SEQ ID NO: 166 - DNA, 1417 bp, Xenopus laevis
caaagaagaaagccaaacaaacagaaagtaacccttccactttaagtgcaggatgtatattatgtgagcagtcacttcctacttgatgtttctaacaacgatcacaagcttgtgggtgtgtggaactggaagtagcagcccgggaatcagctgagcctgatctagacacagactgcaggccgaccttgggcacagacaccaggctgggatatataatatggcgtctggtcaagcagaagagttccgacccgtggaactgggagggcaggagctccctaaatcagatgactcgaagaacactgcaagccagaaggagcaagcgccggcacctcctaataatactgagccacatcaattgaatgactaccttatgagaaagtattttgtggccaggccaggagcatttgagcaggccaacgaagacttgacaaatcagatttttacaaaggaaaatgaaactgtgaacagtgcctggcttttggcagaagttgatcactggaacaatgagaaggagcggcttgttctcatcactgataaaagtcttttcatttgtaaatacgactttatcatgctgtgctgccagcagattcagaaggttcctctcaattacattgacaaaatatgccttggaccgttcacattccctcagagatctctcgacaagagagaaggcgagggtcttcgagttcattgggataaactgcgtgaagcctcttttgccaatcgctggaatccattttcagaggctttaccttacactacttttattgatcaccccttgaaaaactgctcagaaaagttttctgttatctgccagatttctggttttagtgatagcctggtaaaagctgcacaagaagctcataaggagaatccagtgccaggcagagccaatggagccatattcctcaaacagccaattgtggtagaaacttatgtgggattaatgtcgtttattgggaatcgcaacaaacttggctattcacttgccagaggaagtgttggtttttgaaatggattaatttgttgaatttggcgaatgtttatctttgctacaattctacatgatcatatatgctactgcatgtcattgttttggcttcaatggcttggtaggtgtaggtacagtatagtttgttagcatttcaataacagaataatacatatatggttatatattacaatccaagatccaaatcttcattttacctaggccagttatgtacatttatacaaacagctatgtacaatgcaaggcatacatcttgtgcaaaaattctatatgcaaatgcacttggttgatacactgttttaaatgttatcctatggtaaattaggctttctataaaatgtaccatacatttttgtactattaaaattggttattatttaacagtaaaaaaaaaaaaaaaaaaaa

SEQ ID NO: 167 - DNA, 2837 bp, Xenopus laevis
attccacacccccccagttgcacccaacaaggagccccccaggggtgttggaggaagttgtcgccgattgtgcaggagactgggggtccctagtgacacccccttccttatcgctaaggatctgccgtcaaggagtcgcagcagcagcagcacatttgtgtaattgtcaccgacatgccgggcaacccctttactccccaattcttctgctcccccttccaacaaactcagcgcccccctcacccccaagctcatttgctttgatccggcagcctattcccgtgccagctagaagaagaagaagacattgaattgctttgcagctctgggagaccccccaatatgcgcttagtggggtttccattgccagcggatgtgtctgtacagcccagccctgcgcttccccctcactaatgcctctgatctgggattcctcctgagctcccaagcctctcataccccaccttctttattattattattattattattattcccctaattcaacccccccccacacacacactcaccttcctttggatatatgctgactttgggggggcctttaggatgtatgagaatgtggacgtcagccccactcactaccacatgatggatttctacagtcacaaccgacagtgcctttggccagagaaaagaattaacccttacgggacaccacttgggactcaacactggagcagttccaaccactcaattgagactcagagcaccagttcagaggagattgttccgagccccccttccccaccaccgctccccagaatctacaaaccctgctttgtgtgtcaggacaagagttcagggtatcactatggagtcagcgcttgtgaaggttgcaagggctttttccggcgcagtatccagaagaacatggtgtatacgtgtcacagagacaagaattgcatcataaataaagtcacgcgcaaccgctgccagtattgccgcttgcagaaatgttttgaggtcggaatgtctaaagaatccgtacggaacgaccgcaacaagaagaaaaaggagcccccaaaggtggacgtgatggagagttacgtgctgagccccgagactcaggatctcatagagaaagtgcgcaaagcccacaaggagacattccctgcgctctgccagctgggcaaatacactacaaatttcagctcagaggagcgagtttctctggacattgatctgtgggacaagttcagtgaactctccactaaatgtatcatcaagacggtggaatttgccaaacagctgccgggattcaccactctgaccatcgccgaccagatcaccctcctgaaatccgcttgcctggatattcttatcctgcgaatttgcacacgttacacccccgaccaggacaccatgacgttctctgacggactgaccctaaaccgcactcagatgcacaatgcgggcttcggacccctcacagacctggtgttcgccttcgctaatcagctgctgccgctagagatggacgacgctgagaccggtctactgagtgccatctgcctcatctgtggagaccggcaggacctggagcagccagataaagtggacaaactgcaggagccacttttggaagcgttgaagatctacgtcaggaacaggcgacccaaaaagccacacatgttccccaaaatgctcatgaagatcacagacctgaggagcatcagtgccaagggtgcggagcgagtgatcactctgaagatggagatcccggggtccatgccccccctcatccaggagatgttggagaactcggaggggttggacacattggggggcggggcatcgagtcagacaccagtcacaccagtagcaccaggaagttgcagtcccagtctgtctcccagctccacccacagcagcccctcctctcactcaccctgacacctcccctcctggaacactgaggggcaggagggcaccaagactcccccttttctacttttacttgacagccccccctcatcactgtgcccaagagaggattgtgggtaacattcaatgtctcaccccccctccagcttggttccccaaaaactctccccccccccccgctccactggattgagaaggacagacggacacgatgtttggggcacaaggggggggtgctggggggtcacgctggattgttaaccctttcactgcactgggaatatggacattggggttggaaatataaaacagtattttagcagaatatgaagttgaaaggaaataaataggaacatttgcttttctacaaggaacagattttactctcaatatcaattgtacttttactacttctccccctctactcactcagtgtggccactttaactgtcagctcattggcccaatactcaatattgtccagccaatcgtgtggccacactgccgacccctggggctgctcttgcacctgaacagtctaaagggtttggggagcagttaaaggggaaataaagagaggagatgtgagtgctttgtgcttgggtgtgtgatggaagtgaagaggaaacaaatgatctagatttcccagcatgctgctcaacacagagggttgcggggaattgtagttcatacaatgaatgacaaagtatcagcaccctcccccatctctaaccactatctatacagctgtgacccccccacattattataccacttgttcttttcacacctctacttcacacaccagcaacaagatttctcagtttgaggttttttatggttaaataattaaaaaagaacaaaaaaaaggaaaaaatgtgacttttcttttttaatgtggataaaaatgaatttgttttactttgaaa

SEQ ID NO: 168 - DNA, 5383 bp, Xenopus laevis
ggcacgagttagctcctgcctccttattgtctgctgcctgcagctcatttccaaaagaaagaaaagaaaaggggcaagagaataaatcataaaaaggcgaaaggatcacataatagaaggaggcagccggctgctcgtgcattcaggatcggcgtgccctacaacaagagccttgaaaagtgtgtgttgtgttgcagtcgtgcatgctcaaatcgcctgagtatatcagaggtgcgggcgctcccagccgtcagtcgctgctgcacgagaagcagtcgcaggcaggaagcaatgcgtttcccaaggagagccctctctccgctcctcgtctctgctttgctctgcctgctgcggataaaggtgtctatagcatcaggccagttcgagttggaaatcttatctatgcagaatcccaatggagagttgcagagtgggaattgctgcgacggccagcgcaacccgacggatagaaaatgctccagggacgaatgcgacacttactttaaagtttgcctaaaggagtaccagtccagggtatcggcagggggggcctgcagcttcggcaccggatatacccctgtcattgggggcaattccttcaacctgaaatacagccggaataatgagaggaacaggattgtgctccctttcagttttgcttggccgagatcttacacgttggttgttgaagcgtgggattacaataatgacactaatgaccccggtgatctcatagacaaagccctccattctggcatgattaacccaagtcggcaatggcaaaccctgaaacagaacgccgggatgacttatttcgagtaccagattcgggtcatctgcgacgagcattattacggtttcggctgcaacaaattctgtcgacctcgggatgacttttttggacactacacttgtgatctgaatggcaacaagacctgtttggaaggctggatggggcctgaatgtagcacagcaatatgtcgtcaaggctgcagctcaaaacatggtacttgcaagacgccaggagagtgcagatgtcaatatggatggcaaggccagtactgcgacaaatgcattcctcacccaggatgtgtccatggcacttgcaatgaaccatggcagtgcctgtgtgaaaccaactggggtggtcagctgtgtgacaaagatctcaattactgcggcacttaccagccgtgtctcaatggaggcacctgcagcaacaccggccctgacaaataccagtgttcctgccctgaaggctactctggacaaaactgcgaaattgctgaacatgcctgcctttctgatccctgccacaatgggggaagttgcttagaaacatctgtgggctttgaatgtcaatgtgctcgaggctggacgggccccacatgcagtatcaatattgacgagtgttctcccaatccgtgtggctatggtgggacctgccaggacttgatcgatggctttaaatgcatttgtccttctcagtggacgggcaaaacatgccaaattgatgccaatgagtgcgaagccaaaccctgtgtaaatgccaactcctgcagaaacctgatcggtagctattattgcaattgccttcctggatggacgggacagaactgtgacataaacattaatgattgccttggccagtgtcagaacggtggaacctgcaaggacttggttaatgggtttcgctgtatctgtccacccggctatgcaggggaacgatgtgagaaagacgtcaatgaatgtgtgagcaatccgtgcctgaatgggggccactgtcaggatgaaatcaatggattccaatgtctgtgtcccgctggtttctcaggaaacctctgtcagttggacatagattactgtgagccagacccttgccagaatggagcccagtgctttaatctagctacagattacttctgtaactgctccgaagactatgaggggaagaattgttcacacttaaaagatcactgtcgcactactccctgtgaagtgattgacagctgtacagtggcagttgcttccaacagcacccctgaaggcgtacggtacatttcgtccaatgtctgtggtccccatgggaaatgcaggagtcagtccggagggaaattcacatgcgagtgcaagaagggcttcactggaacttactgtcatgaaaatattaatgactgtgaaagcaacccatgtaataatggaggtacctgcatcgatggcgtgaactcatacaaatgtatttgtagcaacggatgggaaggcatatactgtgaaacaaacattaatgactgcagtaaaaacccttgctacaatggagggacttgtcgggacttggttaatgatttctactgcgaatgcaagaatggctggaaaggaaaaacctgccactcccgagacagccagtgtgatgaagccacgtgcaacaatggcgggacctgctacgacgagggagatacatttaaatgtatttgctcccctggatgggaaggagccacgtgtaatattgcaaggaacagcagctgtttgccaaatccctgctttaacggtggaacttgcgtcgtccgtggggactctttcacttgtgtttgcaaagaaggctgggaaggaccaacatgctcccagaatactaatgactgcagccctcacccatgctataacagtggaacgtgcgttgatggagacaactggtatcgatgtgaatgtgctcctggatttgctggtcccgactgtcggataaacatcaatgagtgccagtcttcaccctgtgctttcggagcgacttgcatagatgaaatcaatggataccgttgcacttgcccgcctggtcgtagtggtccaaggtgtcaagaagttacaggaaggccttgtataactaatggacatatgatgccagacggggagaaatggaacgacgattgcaactcctgccagtgtctgaatggcaaagttacatgctcaaaggtgtggtgtggccctcagcgttgtgacataaacggcgacagcgaatgccctgctggacagacttgtgttccagttcgagacaaccattgctttgttcctccttgcaccgggctgggtgaatgctggccgaccaatcagccgcctgtcaagacaaagtgtaatgccaacgccagctatcaggatgcgagctgtgccaacattacgtttacatttaacaaggagatgatgtcaccgggactcactaccgagagcatttgcaatgaactgaggaatcttaacattttgaagaatgtttctgccgaatattccatctacatcacctgtgaactgtcgccttctgcaagcaacgagatccatgtggctatatctgtggaggaaaacggagacggcaggaatccagttaaagacatcaccgagcgaatcattgaccttgttagtaagcgagatgccaacaacactttcattgcttccgtggcagaagtccgagttcagacgcggcacaccaaaaacgggacagatttcctggttccattactaagctccattctgaccgtggcctggatctgctgcctggtaaccgctttttattggtgcatccggaaacgcagaaagcaaagcagccattcccacacggcgtcggaagacaacaccaccaacaacgtccgggagcagctcaaccagatcaagaaccccatcgagaagcacggagccaacaccgtccccatcaaagactatgaaaacaagaattccaaaattgcaaaaataaggacacacaattccgaagtggaggaggacgacatggacaagcaccagcaaaagagcagatacgtcaagcagccggcgtactcgctggtcgaccgagacgagaagccacccaacagcactcccagcaaacagccaaactggacaaataaacaagacaacagagacttagaaacagcacagagcctcaatcggatggaatacatcgtatagcagagtgtagcgctgccatgcagagcttgtgactgctcccaagggcttcgcttcactacttcttaaactgtcgtgtaatatttgagtctgaggctattatttacttagaatccctatgttaatttaagttttgacaagctggcttacactggcaatgatagttgctgtggttggctggaatagcaagtgctgcatttcacatctatgcaaaactagtccaaaagtgccctcatgtcaattcagctgcagtcggaacaccttgaaaatgccattcggatattctctctctctctccattcagttcttctccgtagcaatgccgccttaggatcatttctttttatttatatttattttagatatagaattttttttttttttaaactttgtacatttggtttttacggtgacgtagaactagttctgtatttgaaagtgcctttgcagctcagaaccacagcaactatcacaaatttattatttatttttttattgttattgtgtcgggggggagggggcgggactgtcggctgacgctggtcaaatgaagaaatttcaattcgttttgttttttttctttccaatttttttttttttgtatagacctgtaaatattttttttattaatcactgtgtatatttgatttattaacttaataatcaagagccttaaatatcattccttttttatttatatgtacgtgtttagaattgactgttttttttgatagctttgtaagcttactgctttttttttttcaaatttatttcttgttacgtatatgccaaaatttaaggtgtttttttttttttttaaatagtttattttttaacaataggacgggctgacatgcctcgatgctgtttttgtacaatgttaaagaacacctttatatagtatcacttaaacctttttttgtaagttccgactcaaaccgttctttttttgagagagagttcgactttagaactatatttgctgctttcagctttgatataaaaaaagacaaaacagaaaaaaaaaaatgagaggacgaaacggagcggctgtcagatattctgctgcaatgcagtgcaagggaatggacggagcagtgcatgtacggagacaacgaaaatcgaattagcggaggcacagtaatcctgtttttttttgtttgtaaattcctttttttttttttttttcaaaaatgaaaatgtactacagaaccacttgtagatatgattttgttctttttattttattatctactgaaactaggggagtattctgttaagctagaggttgaatacttgaacagtagaatgtcgagtgatcactgttgctttcctatacgttacactgcctgccttaacttcaagagaaagagaatctatgaccaaaaacaataaaagtttgtgatatttaaaaacaaaaaaaaaaaaaaaaaaaaaaaaaaaaaaaaaa

SEQ ID NO: 169 - DNA, 1337 bp, Xenopus laevis
agctgggaaggagagggctgcctgctcatgcgctgaggtcgcctatagacacagcagtagcctggagctgccgcactgacactgagttaagggctcgcctgcatttgctaagcaaaccgtctgcaccagctgtggcgattatatcgtgcgccgctcccctccaaagcctggacgtggtataagccagtggctgtcatatttatccgactcgtgttcgcttgacggatttttccgaccagtcagtcaccagccgttatctccctctacagcccgcatctttccaaggagactttacgcttcaacatggaaggaggcgcctatggagctggcaaagctggaggagcctttgacccccagacgttcatcaggcagccccatacaatccttagaatggtctcctgggtcttctccatagtggtatttggctgcattattaatgaaggatacatcaatagttcaactgaagaggaagagcactgcatcttcaaccgaaatccaagtgcctgcagctatggggtgactgtaggggtgctggcattcctaacctgcctgctatacctagcagttgatatctacttcccacagatcagcagtgtgaaggaccgtaaaaaaacggtcatatctgatattgctgtgtctgctctgtgggcattcttttggtttgttggcttctgtttcttagccaatcagtggcaggtttccaaccccaatgacaatcccatgaatgaaggtgcagatgctgcaagagctgccatcacattttccttcttctccattttcacttgggcgggacaagctgtgctagcctatcaacaataccgcctgggctccgactctgcgctgttttctcaggactacatggacccaagccaagaccaagggcctccttatcccccttacgccagcaatgaagacttagatccctctgcaggctatcagcagccccccacagaagcctatgatgctggctcgcatggttaccagacccaggattactgaaagcccatataataaatgtccctggctgagaggttgacaactatttgtggtttttatttcctttaaaggcactggcctcttcgatagcaaaaagggttacaaaatattcttattttttaccatagggtgagggagagagtattttatttttggttagtttaaaacttgatttttcttgcctgttatcattttgattgttatttttggaattatttgcagctatgccaatccaattccatgttgttcctttttttttgttttcataaccatcctttttgtgtctcttgtttcattaaaatgatagataggaaaaaaaaaaaaaaaaaaaaaaaaaaaaa

SEQ ID NO: 170 - DNA, 2834 bp, Xenopus laevis
cacacccccaacctattcccaacacaaacagctggatcagagctcaggtgacgtcactgccgccctgttgcacagctgatcgctccacggtaatcgggacagtgtcgctccgcccatccgacatcgtttggggcgagacagtagggccgggaatggagagagacccaacttgtctgcgtgaaaacggaacatcacaggccctggcgggactcccctgtctgtgtcacctgaagaaacaggtttggggcaacaaccgagggtttgaaggagtcccgcattgttagtggccttgtctgttgtctctctacgatttgccaatgttcatagagtattagggatccagcttgtggttacacccatctctgccttggcagggggagctttgaaaagaagcgtcttctcaactcagcgggacgatgtggctgaagctgttctttctgctgctctacttcctaatcctatttatcctggcgaggttctttgagacgattgtgtggtacgaaacaggcatcttggccagtcaactgctggaccctgtgactctgagctttcaccagctcaagaccatattggaatgcaggggtctgggatactcgggattgccggagaagaaggatgtcagggagctgatggaaaaatcaggagacctgatggaaggggaattgtattctgccatgaaagaagaagaagcctccgagacggtgtccagtaccaacttcagtggggaaatgcacttttatgaactagtggaagacacaaaagatggaatctggttggtgcaggtaattgcaaacgaccgaagtccccttgtaagtataactcactgggaaaaggtggtgaaaaaagtgacaacatttggaattcgcaccgggacctttaactgctccagtgatcccaggtactgcagaaagagagggtggatgaggtcgacgcttatcatagccgtgccccagaccagtacttctaaaggcaaagtgatgctgaaggaatacagcgggcgcaagattgaaaccgagcacattttcaagtggataaccgcacacgctgcctcgcggattaaaaccatttatagttctgagcacctgaaagacgaatggaacaagagcgaccaatacggagtcaagttgtaccttttcgccgacctcgatcagcctccagcttttttctctgcgctcagcgttaagtttactgggagggtagagttcatatttgttaatgttggcaactgggataacacaagttgcatggcggaagttggcatcttcaggaccccatcttatgttcttaaaaccccagagggaatttacaagtatgggaataatacaggggaatacatttccctgcaagccatggatgcgtttttacggtccctgcaaccggaagtgaacgacttgtttgtgttgagcttagttttggtgaacctcatggcgtggatggacttgtttatcacacaaggggccaccataaaacgatttgttgtcctaataagcactttagggacgtacaactccctgctgatcatctcttggttacctgtgctgggattcctgcaacttccttatcttgacagtttctacgagtatagtttgaagcttcttcgctactctaatacaaccaccttggcctcatgggtgagggcagattggatgttctactcctcacaccctgcactgtttctcggtacttaccttggtcatggattgctcattgattactttgagaagaaacggcgacgtaacagcaacgccgatgaattgaatgccaacaatctggagtggttgtccagcctttgggactggtatgccagctacctgtttcaccccattgcttcgctgaaccattttcccatggactacgactgggatgaagacccggacctgtttctcgagaggttagcgtttcccgatttatggcttcatcctctgatccctacagattacattaaaaatctaccaacgtggcagttccaacgtccatgttctcagtcggatgaagaaaccttagacggatcccaggagagcgactgcgactcggaactggaaagcaatgatggtaaacgcttatgccgccatgcagattctgcattagaatgcacctgtcggagttgctcgtgtccctgtaaaacaccaaaatccagcccaaatggtaggaaaaccaggttgtccaaatgcaccaagaactacatggagcccaactgggccacgtggcctgggaacatgttgcactgtacggagtgtgttgtttgtttagagaattttgaaaatggctctttgcttatgggtttgccttgtggtcacgtatttcaccaaaattgcattgtgatgtggctggctggagggagacactgctgcccagtttgccgctgggcatcctataaaaagaaacattttgcacgtcctccgtcttctaccagcgaaaccccttcctagcatcgtatgtgacggcccatgtgcttccttggctgtagctgcttccgtatccgttagaaatttcatcgaaccaacgtcttggtaaattggccaaatgcacattacgtctgtccatgttgttgctttgtgtgttgcgtgtcattgcctatgtaagcaaaaactggtttattttttttttttggtttccacagagtctattgctactcgagtgtttattttccagactggttacttttaataataatttacttctaattaaaaaaaaaaaatgcaagtgacatgactttgtaacacctgttaaatatactgaacaccttatagtattccgagacatgtgggatggtacgttggtgcaatttgactgaaactaaatgaaggaattaatgcaaaaaaaaaaaaaaaaaa

SEQ ID NO: 171 - DNA, 1025 bp, Xenopus laevis
cggcacgagcagccatcaactcagaggcagcctattgtctggagccaagctactgtattggacttgtgcaggaaactcctagttggaatcatttaggaaagtcttactactgatggagactctgcaccatcccctggtaaaaatggaagaggactatgccttgagctctgactctgaaccgaattctacttgcatggccaacacttgggactggaaaagtcataatgagagctactcacttagccagaccccatcgcctcagagtgtgtcccctgcagcctcctatgagtctacttattcctccagcccacacactggacaaggtctggaggagatgccattcagctacagcttgctacagtatccaacactttgccatggagacaacggagctctcaccaagaaggatcatgggcataaaacttccatgacgactcatcgtaggagaaaagccagtgagagggagaagctacgcatgagggcaatcgctgaggctcttcataccctccgcaacaatttaccaccaatgtacagccaagggaggcagccgctcaccaagatccaaaccttgaagtgcaccatcaactacatcagtgaactcacaaaccttctccagtgctccaagagagcgtgaggttggctatcgattctgcaggagctgaggactagggttgcaatgggtttaactcaggacaagtccgttttctgctgatggacaaatgtttggggatcttctgtaacatggagatatctcgactgaaacaccaggctggatttagttagtctctctaataagcagcctctaaatactcttcaatgtgaagaggtaaaaatgacttaaagactctgcttttctagaagtctgtgtacccctgccatgcttatgtgcaactgctgtaaataccccactgtttgtgtatatttgatacttacccttcatattctgattatttataataatatggtcatgttcatactgaattgtaaaataaaaatactattaacttaaaaaaaaaaaaaaaaaa

SEQ ID NO: 172 - DNA, 3305 bp, Xenopus laevis
agagccaaacactattcagtcctcgcagtgagagacagatgccgaggtcctgtctgcctcctcttccagcccaagaaagttccctgagttcccccctctcttgttcttcctctggatcttacaggagaaaaggcagcagaagccacagccctgggactcagagaagtgaggggaagaggaggagagagacatctgaattgggacagttccaagaatgaaagcggcgctgtaacccttgcacagaggacacctacaaagtagcaaagaattctctgcaaagggaacagacacaaagtcgctgccagcgggagagatagacagtagcgcggagttctctgcacacctccagtttgccggtccggggagcagaagtgacagttggtgccgggctccttgtgcttcggcggcacctcagggtgcaggagtgaagggagggagagcgcagtatggctggagagttgcccattgctacaccactgcccaccagcccgctagccatggagtacctcaacgacttcgacctgatgaagtttgatgtgaagaaggagccactgggagggaggccagatcgggcgataaggcagtgcaaccgcttacagcccaccggctccgtgtcctccacccccatcagcaccccgtgcagctccgtgccctcctcccccagcttcagccccaccgagcacaagactcacctggatgacctgtactggatgtccagcagtagctaccagcacgtcagccctgaggcgctcaacctcaccccggaggacgcagtagaagcccttattgggcagcaccaaatgccccctcagctgcaaggctacgagagcttcagggctcaccatcatcatcatcaccagaaccagcatcagtatcagggcgtccaccacgaggaaatggggctcccccatcaccacccgcaccatcaccaacaccagcaccaccagacatctcccagcccatccggctcctccagctcctcccagcagctccaccaccagcagcagcactccagctccagcgcagtggaagacaggttctccgacgaccagctcgtctccatgactgtccgggagctcaaccgacatctgaggggcttcaccaaggacgatgtgatccgcctgaaacagaagcgacggaccctaaagaacagggggtacgcccagtcgtgcaggtacaagcgagtgcagcagaaacataacttggagggagagaagacccaactggttcagcaggtggagcagctgaagcaagaggtgagccgattggccagggagagggatgcctacaagatcaagtgcgagaaactggccaacaacaacagcagcaacttcagagaggctggttccaccagtgacaacccatcatccccagagttcttcatgtgagtgtgtcccacagccaaaccccaagtctactccatctgccaaaccccaagtctactccatctgccaaaccccaagtctactccatctgcataggcttcactttcatcaactccagtgagcacccactctcttgttttatagactagtcttttggggttgggggcaagagagggagtgaaaccattgattcactcaaggagtattcaagatgcttctccctctctccttgtttgagggggggggagggggcgcatatcaacttctttctgggggtctgggaaggtgaagtgacttctaaccccaccaaagactgtgctggacggttgacactgccactttggagacaaactgaatgaacaatatatgcagatttgttttttttttatatattgcagtaacattagcctaaatcctcacactcatgaatacaggtggggcattagggcaccctccccttttttggttttattgcctgcttgattatctagaaaatattacaaaaaaaaactgcattcaaatattactcctgcatgctggacatgtatggtaatactttctattttgtatcacgatatcgttttaaccctgagcatgctgcctcttctcctcttcttcttgtgccacatcttctattctttctgctgctcagaggtgtctttaattccaggccgcttgcaacttcacttccaatgtaaaatagtgcagcttcccccccccattcccatcatttcatatagcgaaatgcctttcatacattttaaataaaaacgggcatttttattgaaattgaaaatcaaccatcagcattttttttagaacccctcatatttagttgccattaaccctttggcgatatttttctgattaaattaaaaaaaacaaaacaactccccagatacttgcaattttctctctctctcaggaacaaagaatggctttaaccccttgggtgccagagccatctttaagtgtatctcgctgcaagagatgtccctgccctcagaaggtgggtagaaacctttgccaacaccaggcctgtaggcatttttggggggggggctgcatataaagggttaatgttttacaagtgtagaaatggcaacatttctccttaccataaacactggcatctgactttaatttttgctgacacctgaacagtccaaagctgcaggcacctagtgctgtgacagctgaaatggtgacttatatagatactaaatgctttctatcaaccctgctagcagcattccgcgtcacgctgtttattcgcagctacaccgtggattttacttcctttactttccctctcccccccccccacgctcagattatttatactgtctatgtagcagattttgtatggagccgggtgctgtttagttgaaatttttctgcaggtcagttaaaaagcgaaacgcgttggcatacagcataccaaaatgaaaactttttttttttttgttaaatgcatttatttctcttttttttttgggcactgctggtgcagatgcattttatggttttattttagtatataagttaatggtaataaaaaaaatatagtttgggcagcacggcgcttgcagtctttcaaaaaaaaattttggtattttctgtcatgcctcaatgatctttgtttattttttttttttttttaattttgtattttcctgattcaactgtgttgaaatcacgtctgcaagcagcagggagttgtttttattccatgtcacgttcagaagggaaaaaaattcaaatcctgcttctctttaaaaaaaaaaaaaaaaaaaaacaactccaaaaaataactggtctattgtagttttattcagactggattctgtttttatgttaacaaaattgtttcctattttgcttattaaaacaattgaaaatggaaaaaaaaaaaaaaaa

SEQ ID NO: 173 - DNA, 2772 bp, Xenopus laevis
gcctggggctggcggtagtgcaaaagggattccatcggtaaggagtttcgggtaggaagtacggagtggagaaccaggcgacggggagacggccatagacaagtttaagaagttcttttgtagacaagactgatcaaaagttgtgcaagtcggcgactgttgcatggtactgagcgaccattcatcctttggataatcatgggccagacggggaagaaatctgagaagggaccggtgtgttggcggaagcgggtgaaatcggagtacatggcgttacggcaactcaaaaaatttagacgagcagatgaagtaaagagcatgtttaacacaaatcggcagaagattatggaacgaactgagattttaaatcaagagtggaaacagcgcagaatccagcctgtgcatataatgactacagtcagttctttacgagggactagagagtgctctgtgaccagtgatttagattttccaaagcaagttatacctttgaaaacactcactgctgtagcctctgtgcctattatgtattcctggtctcctctccagcagaattttatggtcgaagatgaaactgttctgcataatattccatatatgggcgatgaggttttggaccaagatggcacatttattgaagaactcattaaaaattatgatggaaaagttcatggagacagggaatgcggtttcattaatgatgagatatttgtggagttagtcaatgcattggctcaatacagtgattatgaagacgatgaagatggagatgacaatcaagacgatgagcaggatgacacggcaaaagatcaagatgataacatggaggacaaggaaactcaacctctcagaaagtttccctctgataaaatttttgaagcaatttcctcaatgtttccagacaaaggtacatctgaagaactaaaggaaaaatacaaggaattaacagaacagcaacttccaggggcacttccaccagagtgcaccccaaatatagatgggccaaatgcaaaatctgtacaacgagagcagagtcttcactcattccataccctgttttgtaggccatgttttaagtatgattgttttttgcacccgtttcatgccactcctaatacttacaaaaggaagaacaatgaagcggcaaatgatggaaaaccttgtggaccacactgctaccagcttttggaaggagcacgggagtttgctgcagctttgacagcagaaagaataaagacaccaccaaagcgccctagtggtcgccgaagaggtagacttcccaacaacaccagcaggccaagcacaccaactgtaaatgtgtcagaagccaaggacacggatagcgacagagaagctggcacggaaactggcggggaaagcaatgataaggaggaggaagagaaaaaagatgagacttcctcctcttctgaagcaaactcccgctgccagacaccaataaaaatgaagccaaatatcgagccacctgaaaatgtggaatggagtggtgctgaggcctccctatttcgagtgctaattggaacctattatgacaacttctgtgcaattgcaagattgattggtaccaagacatgccggcaagtctatgagtttagagtaaaggaatccagtattatttctcctgtcattgctgaggatgttgacactcctccgagaaagaaaaagaggaaacacaggctttgggcagcacactgcaggaaaatacaactgaaaaaagatggttcttcaaaccatgtttacaattaccagccgtgtgatcacccccgccagccctgtgacagctcatgcccctgtgtcatagcccagaacttttgtgagaagttctgccagtgcagctctgaatgccaaaaccggtttcctggatgccgctgtaaagcacagtgcaataccaagcagtgcccttgctacctggctgtacgggagtgtgacccagacctgtgcttgacttgtggggctgctgatcactgggacagtaagaatgtgtcctgcaagaactgcagcattcagcgcggttccaagaagcatttgcttttggctccttctgatgttgctggctgggggatcttcatcaacgacactgtacagaaaaacgagttcatctctgagtactgtggagagatcatatcccaggatgaagctgatcgaagagggaaagtgtatgataaatacatgtgtagcttcctcttcaacttgaacaatgattttgtggtagatgcaacacgaaaaggcaacaaaatccgatttgcaaaccattctgtgaatccaaactgctatgcaaaagtaatgatggttaacggagaccatagaatagggatttttgcgaagagagccattcagacgggtgaagaactcttctttgattacagatacagccaagcagatgcgctgaaatatgtgggtattgagagagaaatggaaatcccctgattctagctacctccttatgaaacccatgccttaccttcttcaggaatttcttactcgcaattttagatacaaagaggggaagaaaaatgtgggaagctgaagttctgagttaccgagtactgtaacagtaatttatagtgatctgaccataacgcaacgactttcctttgccagttgcaatgtattttgtacctaggaacgtttggcaataatgttattcaggtacatgtcccacctcaaataaaatatacttgaacttctgtattttctgtacttttcatttgtcaggctacaactttagatattaaatagatatgaaaaaaaaaa

SEQ ID NO: 174 - DNA, 836 bp, Xenopus laevis
cccacgcgtccgatagagaagatggcgggcaagagggctctagtgattctggccaagggggccgaggagatggagacagtcattcctactgatgtcatgagacgggctggaataaaggtaacggttgcaggtctaagcggaaaggatcctgttcaatgcagcagagatgtgatgttgtgtcccgacactagtctggaggaggcccgcacacaggggccatatgatgtggtggtacttccggggggcaatctgggtgctcagaatttgtcagagtctcctgtagtgaaggaggtgttgaaggagcaggaagccaaaaaaggtttaattgcagctatatgtgcaggacccactgccctgactgtacacggtgtaggaattgggaaaaccatcacaacacaccctctggcaaaagataaaattgtgaatccagatcaatataaatattcagaagagcgcgtggtcaaggacgaaaacttcatcacaagccggggccccgggaccagctttgagtttgctctagagattgtgtgcaccctacttggaaaggaggtggcagagcaagtgaaaacaccacttcttctcaaagactagccatgtcctaaactgctactgtctgggtctctattggtaccatagtcatggtgcaaaatgagtcacctttgtttctgcagataataaggaaaataataataatctgctttattcttcaatcctctgaaatggttaccctaaataacaggaattgcacttaaacattaatatatagttgataaaatgctgtacatcatgcacttgcaaaataaaactgcgttgaagcattaaaaaaaaaaaaaaaa

SEQ ID NO: 175 - DNA, 855 bp, Xenopus laevis
atggaaggcttgagaggaggagagggatcgtccagtaaccagtgcaagaatttcctctccagcccctcggtgtttgggagcccctcgagcaggacggttccgggattggcctattcagcagcagatcgctccggctcatcccgggctgaggccaccaaagaaggtcccacttgccccgcttccactggcccgtccctgggctacggataccatttcggcaacggatactacagctgtcgcatgtctcatggggtcgggctacagcagaaccccctgaaatcctccagccatgcttccctagggagctttccagtggagaaatacatggacgtgtctggcttggccagtaccagtgtccccagcaatgaggtgtcttccagggccaaggaggtgtcttactttcagggctacaccaacccctaccagcatgtgcctggctacttggatatggtctccacctttagctctggggagcccaggcacgagagctacctctccatggaaggctaccagtcatggactctggctaatggctggaacgggcaggtttattgtgctaaagaccagtcccaagccccacacttctggaagtcctccttcccaggagatgttgcgctaaaccaggcggatatgtgtgtgtacaggcgcggcaggaagaagagggtgccctacaccaaactccaactgaaagaactggaaaatgaatatgcaatgaacaaattcattaacaaggacaagaggagaaggatatctgccaccaccaatctttctgagagacaggtcactatctggttccagaacaggagggtcaaggacaagaagatcgtgtccaaactaaaggacaccatctcctga

SEQ ID NO: 176 - DNA, 6788 bp, Xenopus laevis
cctcctctgaggcaaaatgtcacagagaccagggcaggaagaccccgaacgttacctctttgtggatcgtgatgtggtgtacaaccccaccacgcaggccgattggacggcaaagaagctggtgtgggtgccgtcggagagacatggctttgaggcggcgagtataaaggaagagcggggagatgaagtggtggtggagctggcagaaaatggcaaaaaggccatagtaaataaagatgatatccagaagatgaacccacccaagttctccaaggtagaggacatggcggaactcacttgcttgaatgaggcatctgtgctgcacaatctgaaggacagatactactccggtctcatctatacatattctgggctcttctgcgtggtgattaacccctacaagaacctgcctatctattcagagaatatcatcgagatgtaccggggaaagaagcgccatgagatgccaccacacatatatgccatatctgagtctgcctaccgctgcatgctgcaagaccgcgaggaccaatctattctttgcacaggtgaatctggagctggaaagactgaaaacaccaagaaggtcattcaatatttggctcatgttgcatcctctcataaggggaaaaaggaccacacaattcctactgaatctcctaaggccataaagcaccagagtggatcgttgttgtatggcgaactagagcgacaacttctccaagctaaccccatcctggagtcctttggaaatgccaagactgtaaaaaatgacaactcctctcgctttggcaaatttatccgaatcaatttcgatgtgactggttatattgttggggccaatatagagacttatctgctggaaaagtctcgtgctgtacgccaagcgaaggatgaaaggacctttcatatcttttatcagctgcttgctggctcaggggaacacctcaaatctgacttgctgctagatggatttaacaactatcggtttgtctcaaacggctacatccccatcccggggcaacaggacaaagataacttccaggagacaatggaagccatgcacattatgggcttctcacatgaagagatactgtccatgctcaaagtagtatcttctgtgcttcaatttgggaacattgttttcaagaaagaacgaaatacagaccaggcttccatgcctgagaacacagccgcacagaaactctgccacctactgggcctcaacatcatggagttcacccgagccatactcacgccacgcatcaaggtgggcagggactatgtgcagaaggcacagactaaagagcaggctgactttgcggtagaagccctgcgtaaggccacctacgagagactgttccgctggctggtctaccggatcaataaagcgttggatcgcaccaagcgacaaggagcttcattcattggtattcttgacatcgccggatttgagatctttgagttgaactccttcgagcaactctgcatcaactacaccaatgagaagctgcagcagctcttcaatcacaccatgttcatactagagcaggaggaataccagcgagagggcattgaatggaactttatcgattttggccttgacctgcagccttgtattgacctcattgagaggccggccaattcccccggggtccttgcattgctggacgaagaatgctggttccctaaagctacagacaaaacctttgtggacaaactagttcaggagcagggaacccactccaagttccagaagccacgccaacttaaggacaaggcagatttctgcatcatccactatgctggaagggtggattataaggcagatgaatggctattgaagaacatggatcctctgaatgacaatgttgctactctgcttcatcagtcctctgacaagtttgtgagcgagctatggaaagatgtggatcgcattgtggggttggaccaggttgcaggaatggcagagactgctttcggagcagcatacaaaaccaagaagggcatgttccgcacagttgggcagctgtacaaggagtccctggcaaagctgatggcaactctgcgcaacacaaaccccaactttgtccgctgcatcatccccaatcatgaaaagcgggcagggaaactcgacccacatttagtgctggatcagctgaggtgtaatggtgtcttggaagggatccgaatctgccggcagggattccctaaccgtattgtattccaggagttccgtcaaagatatgagatcctcacacccaactccatccctagagggttcatggatgggaagcaggcatgcgagcgaatgatccggtctttggaattggatccaaacctttacaggattgggcagagtaagatcttcttccgtgctggcgtcctggctcatctggaggaggaaagagacctaaagatcactgatattatcgtactcttccaggctgtctgcaggggatacctagctcgcaaggccttcgccaagaaacaacaacagctgattgccctcaaagtgctgcagagaaactgtgccgcctacctcaagctgcggcattggcagtggtggcgtctcttcaccaaggtaaaaccgctgctccaggtcacacgacaggaggaagaactggttgccaaagatgaggaacttctgaaggtgaaggagaaacagtccaaagtggagggagaactcgtagatatggagcaaaagcaccagcagctggtggaggagaagaacatccttgccgagcagcttcatgcagagacggagctgtttgctgaagcagaggagatgcgagcccgactagccatcaagaagcaggagatggaagaaattctgagagatctggagatccgcatggaggaagaagaggagagaaaccaggtgttacagaacgagaagaagaagatgcagacacacgttcaggacctggaggagcagctagatgaggaagaagccgcacagaaactgcagctggaaaaggtgactgcagaagccaagatcaagaagatggaggaagatatcctagtgctcgaggaccagaattccaagttcctaaaggagaagaagctactggaggaacgtattgctgagtcaacctctcagctggctgaggaagaagaaaaagccaaaaatctggcaaagctgaaaaacaagcaagagatgatgatctcagaccttgaagagagactaaagaaggaggagaagacgaggcaggagctggagaaagcaaagaggaagctggatggcgagaccactgatttccaggaccaaattgctgagctgcaggctcaaatcgaggaactcaagctgcagctggccaagaaagaggaggagctacaggcggcacttgcaaggggagatgaagaggttctgcaaaagaacaatacgctaaagttggtgcgagaattgcaggcacagatcgctgagttgcaagaagaccttgaatcagaaaaagcgtcccgcaacaaagcggagaagcaaaagagggacctgagtgaggagctggaggctctaaagactgagctagaggatactctagacaccactgcagcccagcaagaacttaggactaaaagggagcaggaagtcgcagaactaagaaagagcatagaagaggagacaagaaaccatgaagctcagattcaggagatgagacagaggcaggcaacagcccttgaggagctctctgagcagctggaacaggctaagcggttcaaagtaaacctagaaaagaacaagcagagcctggagtcagacaataaggagctggccacagaggtgaagtccctgcagcagatgaaggctgagtccgaatataagaggaaaaagctggaagggcaggtgcaggagctacatgctaaggtgttggaaggagaccgtctgcgggcagatatggtggagaagagcagcaagctgcagaatgaactggaaaatgtttcctctcttctagaagaagctgaaaagaaagggatcaaactggcaaaggatgtagcaagcatggagtctcagctacaggacacacaggaattgctccaagaggaaacccggcagaagttaaaccagagcagccgcatccgacaactagaggaggagaagaacaatctgcaggaacagcaggaagaggaagaggaggctaggaaatctcttgaaaagcagatcctcagcctgcagtctcagctaatagaggctaagaaaaaagtggatgatgaggtgggcaccatcgagggactggaggaagtgaaaaagaagctcctgaaggacacggagggtctgggacagaggctggaggagaaaatcattgcctatgagaaactagagaaaaccaaaaaccggctccagcaggaactggatgatctgatggtggatctggatcaccagaggcagattgtgtccaacttggagaagaagcagaagaaatttgatcagctcctggcagaggagaagaacatctctgcccgccatgcagaggagcgagaccgtgcagaggccgatgcccgtgagaaggaaaccaaggccctgtcattggctcgagccttggatgaagctctggaagctcaagatgagtttgaaaggctgaacaaacagctccgagcagagatggaggatttaatgagttccaaggatgatgtggggaagaatgtgcacgagctggagaagtcaaagcgggcacttgatcagcaggtagaggagatgcggacacagctggaggagctggaggatgaacttcagggcacagaggatgccaagctgcgcctggaagtgaacatgcaggccatgaaagctcagtttgaacgggaccttcaaacccgggatgaacagaacgaagagaagaaacgggcactggtgaaacaggtgcgggagctggaagctgagctagaggatgagcgcaagcagagagctatggctgtggccatcaagaagaagctggagatggatatgaaggactttgaatcccagatcgaagctgcaaataaaggcagggaagatgcaatcaaacagctccgcaagcttcaggcccagacgaaggattaccagcgggagctggaggaggctcgggcatcacgagacgacatctttgctcagtccaaggagaatgagaagaagctgaagggcttagaggctgaaattcttcagctgcaggaggaactggcagcttctgagcggtcacggcgccatgcagagcaggaacgggatgagctcgctgatgagatttccaacagcacatctggaaagtcagccctgctggatgagaaacgacgcctggaagcaaggatagctcatttagaagaggagctggaggaagagcaaagtaacatggagttgctcaacgaccggttccgcaagaccaccctgcaggtggacaccctcaactcagagttggctgcagagcgcagttcaggccaaaaaagcgagaacgctcgtcagcagctggagcggcagaacaaggaactaaaagccaaactacaggaactggagggttcagtcaagtccaaatttaaagccactattgccactctggagtctaagattgcacaactggaagagcagctggaacaggaggctaaggaacgggtggcatctaacaaactggtgcgcaggactgagaagaaactgaaagaggtgttcatgcaagtggaggatgagcgcaggcacgctgaccagtacaaagagcagatggaaaaggccaatactcgcatgaaacagctgaagaggcaactggaggaggcagaggaggaagccactcgggccaacgcatcggcacgcaaactccagcgggaactcgatgatgcgaccgaggccaatgaggtgctgagccgggaggtgtccaccctgaagaacaggctgagaaggggcggcccagtgtccttttcttcctcctccagtcgctcaggccggcgccagctgcagatagagggggcgtccctggatatctctgatgatgaaatggaacctaaaaacactgatgtcaacaacatcccagtagcagctgagtgagtgactcttgtcaggtcccattgagtcaggacaagctgagcattgaagcggctgctcccctcactggcaaaaaaagtgctttttttgtttgtttttttaattccaaaatacagatccgttgaacttgttctgctgaaccccccacaaaagcccatctctgccccagaagggcttcatgtccagctcttcagatctccatttagacttttttcctttctctccatcttctggcatcacgtgaagaatctgaacactacgtctgtgaccccatcccacgtggggtgagggtggcagtggggggggggggggtatgtggttaatttctcaccccttttgcttcttgtagctggtacattcccccatccaccctttattctgttgacagcagaagaactcaactgtgaatccgttactgtcttttcattgcccctcattggctccaaaacttctactcacctgtccaatcagcactggaaatgtcactcacttctagcgcccgccttaacaggctctttcaagctgtgattggcacaatgtgactccacctttcagcctgtattctcattcccaggcttgtattggtgggatgttatactcgcacccaggcctgtattggcagttgtgaaattcactctcagactggcatttaaagagtgtgacctgtatacgcagagtgtgaaagaaatagctatcttattacacatttaatccccccccccgtcagcaaaaaactcgacccttttatagtcaaacagaagacaaacggtgccttagacacttaaaatttgagatg

SEQ ID NO: 177 - DNA, 3392 bp, Xenopus laevis
aggcggaaggaggagagtttatatctaccacagaagcaccgccatcatgggatacggggccggaagagacaagtatgagcccgcagctacctctgagcaggggggcaagaagaaaaaaggaaaaggaaaggggaaggagaaagacatggacgagctaaagaaggaagtgaccatggaggaccacaaactgagtctggatgagctgcaccgcaagtttgggacagacatgcaaagaggtctgaccacagcccgggcagcagagatcctggcacgagatggacccaatgccctcacccctcctcccactactccagagtgggtgaaattttgccgccagctgtttgggggtttctctatgctgctgtggattggagccatactctgtttcctggcctatggtatccaagctgccatggaagaggagccacagaatgataatctctacctcggtgttgtcttgtctgctgtcgttatcatcaccggttgcttctcctactaccaagaggcgaaaagctcaaagatcatggagtccttcaagaacatggttcctcagcaagccctggtaatccgaagcggagagaagctgagtatcaatgcagaagaagtggttttgggtgacctggtcgaagtgaagggaggagatcggatacctgcggatcttagggtcatctcctctcatggctgcaaggtggataactcttccctcactggtgagtccgagccccagacccgctctcctgacttcaccaatgagaacccgctggagactcgcaacattgctttcttctctacaaactgcgtggaaggcacagcccgtggaattgtcgttaacaccggtgatcgtacagtgatgggccgtattgccactctggcttctggcctggatggaggacgcacccccattgccattgaaattgagcattttattcacatcatcactggtgtggcggtcttcctgggggtctccttcttcatcctgtcactcattctgcagtacacttggctggaggccgtcatcttcctcattggtatcattgttgccaatgtgccagaggggctgctggctacagtcacggtttgcctcacactgaccgccaaaagaatggcccgcaagaattgtcttgtaaagaatctggaagctgtggagactctgggatccacttctaccatttgctctgacaaaaccgggaccctaacgcagaaccgaatgactgtagctcatatgtggtttgataaccagatccatgaagccgacaccacagagaatcagagcggtgcctcctttgataagagctccccaacatggacagccctgtctcgggttgctggtttgtgtaacagagcagtgtttcaagctggacaggagaacacccccatcctgaagagagatgttgctggagatgcatcagagtccgctctgctgaagtgcattgagctgtgttgtgggtctgtgagggatatgagagaaaagaaccacaaagtggcagaaattcctttcaactctacaaacaaataccagctgtctgtacacaagaatgcaaacccatccgagtcccgctacattctggtcatgaaaggagcccctgagcgtatcttggatcgatgcacttccattatcttgcagggcaaggagcagcccttggatgaggaactgaaggatgctttccagaatgcctacctggagctgggtggcctgggagaaagagtgttaggtttctgccacctcgctttgcctgatgaccagttcccagatggatttcagtttgacacagaagaagtgaacttcccaacagagaacctttgctttgttggattgatctctatgattgatccaccccgtgctgctgtgcctgatgctgttggcaaatgccgaagtgccggaatcaaggttatcatggtaacaggcgaccacccaattacagccaaggccattgctaagggagtgggaatcatctctgaaggcaacgaaactgtggaggatattgcagccaggctcaacattcctgtcaaccaggtgaaccccagagatgccaaggcgtgtgtgatccatggcacagacctaaaggacatgacagaagagcagattgatgacatcctcaggcatcacacagagatcgtatttgccagaacatctcctcagcagaagctcatcattgtggagggttgtcagcgacagggtgcgattgtagcagtgacaggtgatggtgtaaatgactcccctgctctgaagaaggcagatataggtatcgctatgggcatcgctggttctgatgtctccaagcaggcagccgacatgatcctgttggatgataactttgcttctattgttactggagtcgaggaaggtcgtctgatctttgataacctgaagaaatcaatcgcctacaccctgaccagtaacatccctgaaatcacacccttcctcatcttcatcatcgccaacattcctctgcccttgggcactgtcaccatcctatgtatcgatctgggcacagacatggtccctgctatctccctggcttatgagcaagctgagagtgacatcatgaagcgacagccccgaaatcccaaaacagacaagctggtgaatgaaagactcatcagtatggcctatgggcagatcggtatgatccaagccctggggggattcttcacatactttgttatcttggctgagaatggcttcctgccctggaccctgcttggtatcagagtgaactgggacgaccgctggacaaacgatgtagaagacagttatggacaacagtggacctacgagcagaggaagattgtggagttcacgtgccatacatctttcttcatcagtattgtggttgtacagtgggccgatctgatcatctgtaagaccagaaggaactcagtcttccagcagggaatgaagaataaaatcctcatctttgggctgtttgaagagacggcactggcggccttcctgtcctactgtcctggaatggatgttgctctgcgcatgtacccgctcaaaccgacctggtggttctgtgccttcccatactcactgatcatcttcatatatgatgaagtccgtaaactgattatcaggcgcagcccaggtggctgggtggaaaaagaatcctattattaaagccttcgggttgtccgaacatttcacgttccctcctgccccccggtctgcctgcacccacccgtctcctgcgtgcacccgtctgactcagcctgttctcatgaaagagatgcatttttggcaaggggcgcagtgtggcctgtgtgcgtccagttctcattgtgccttctccggtatcgttactttctttttcttttttgtaatgggagcacgttcagagatgttttatatatctgcatttttacaaataaaggcggtttgaagagtt

SEQ ID NO: 178 - DNA, 677 bp, Xenopus laevis
gtgattgttaggcgcagtagtctggtctggctcgttacccagcatgctcagtcacacactatgggaatgaggctcctgcctgcttctagtctcgctctcttttcagtggcattgtgaatggccgccaacaaggaacgcacttttattgccatcaagcctgatggagtccagcgcggcctcatgggggacatcattaagcgctttgagcagaaggggttccgcttggttgccatgaaattcctgcaggcttctcaggatttactcagacagcactacattgatctgaaggatcgtccattttaccccgggctggtggaatacatgaactctgggcccgtccttgctatggtctgggagggactgaatgtggtaaaaactggccgtgtgatgctgggtgagaccaaccccgctgactccaagcctggcaccatcaggggagacttgtgtatacaggtcggcaggaacatcattcatggcagtgactcggtggatagtgccaataaagaaatcgccttatggtttaaagacgaggagctggtggagtataaaagctgtgcgtatgagtgggtgtatgagaactaagtgcccctttcctcttcaccttcattccgttacctctttataccaataaagtgttacatcccaaaaaaaaaaaaaaaaaaaaaaaaaaaaaaaaa

SEQ ID NO: 179 - DNA, 1096 bp, Xenopus laevis
gggaggttttgtgtttgagaggagcggcaggcaccaggtttaatatgaataccaacaagaagcagagattggatatggagaagcctaccatgtctattaagaactactttgtggataaaacaaacgagtcccttgcacccagaagaacacttaaagtaatccagccatctgcatctggatgccttgttggaaggaccaaagagcctgttaaaaattctacaaaaagaaagctgtggaatgatcagctgacttcaaaaaaggctaaagttgaagtggctgttgatccagaacacagggaaaacaaagattgctcatctgaagcttatgaccttatggtgaaagaaacaccaacttgcctttactggaaggaggttgcagaggaacgaagaaaggccctctatgaagcattacaggaaaatgagaagctgcataaagaaatagaactcaaagatgaagaaattgcacgtttgaaacaagaaaatgacgaattaatggaacttgctgggcatgtacaatacatggctaatatgattgaaaggctcactggaaatgctccacgaagtcttgaagacttaaaggatttggatttggaagaagcaagatttgaagatgaagcagacatggcagaagcaaggattgaagatgaaactgacatggctcggccctctaattcagatcagaatatggatgcacatactgtctaggctgtgaattgaccacatgagacttaaagtggcctgaaacatatttaaagatgtcatggtcagtggagggtggaaacatgccattttgtaattgtccaatgttttgggaagggtttaatttcggtgaaactgaccttaaactacagaacttgccatctgaaagtttttatctgctaaatatttaagttggtcacttgacagacaaatactatgtatttctttattgtaaataggtttttttaatgttccagcctttatgtgaggtgattgtacatacttgaataaacttcagttttgaacgtgttctaaaaaaaaaaaaaaaaaaaaaaaaaaaaaaaaaaaaaaaaaaaaaaaaaaaaaaaaaaaaaaaaaaaaaaaaaaaaaaaaaaaaa

SEQ ID NO: 180 - DNA, 1918 bp, Xenopus laevis
gaattccactgctctgaactgactgaaggggaaagtaaatagtgcccgaaagagccagaggcagagggagataaattgaatttgctgctcacaatgtctctaacaggctactttgcagctccgctatgcagcatctttctgtttattcttgcacatgcagatgctgggcagcaggaggacagtttgtacatgtggattgatgctcaccaagccagagtattaataggctttgaggaggatattctgattgttgcagaggggaaaatggcaccatttacgcatgattttagaaaagcccagcagcgaatgccagccatacctgtcaatatccatgccatgaattttacttggcaggcaacagggcaggcagaatacttttatgagtttttatcactgcggtcactagataaaggaatcatggctgatccaactgtgaatatgccattactgggaacagtgccgcacaaagctacagttatacaggttgggtttccttgccttggaaatcaggacggtgttgctgcctttgaggtgaatgtaattgttatgaactcagaaggcaatgtgattcttcagactccacagaatgctatctttttcaagacttgccagcaagcaaaatgtacaggaggatgcagaaatggaggtttctgcaatgataggcatgtctgtgaatgtcctgatggcttttatggcccacattgtgagaaagcactctgcatgccacgatgtatgaatggtgggctctgtgtaactcctggattgtgcatctgtccacctggctattatggcatcaactgtgataaagtaaactgcaccacacattgtctgaatgggggaacctgcttctatccaggaaagtgcatttgcccctcaggatatgaaggagaacagtgtgaaacaagtaaatgccagcaaccctgtaggaatggtggaaaatgtagtggaaaaaacaaatgcaagtgttccaagggataccaaggagatctgtgttcaaaacctgtttgtgaaccttcttgtggagctcatggaacctgcattgaacccaacaagtgtcagtgtaaagaaggctggaatggaagatactgcaataagaaatacggatccaatctcatgaatgccctaaggccaacagggtccagaaacagacagcacacgccctcaccaaaacggactgaagacaggcaagccctacccgaatccaattatatctggtgaacccatatatctgaaatatttttacattgcacaaaatgcaccaccttcataaaccttttatgtgttggatgatacagtgctgtttattgagactcggcccaaaaaataaaacccactgatatagttactgctcctttcccaaacttccagtgtgtctttaaaagaatctctctgctatcggtggtttccagaataaacattatatattttttacttctgcatcccattttaggtttcatttattatggcttaccaattccaagcacagtttaaggtcagggtgttgtagattttaaatacatgaattgcagaagtctggcttccagtgggttgtttatttctttgcgcttgtgtatttactgtagttttgtattaattacattttataatttaaaaagtcagctcgttattgtttttgtaattgctgccagtgccgtggattcctactgtgctgtagtctgcgggctgacccagccctacaagagtttcttttgtactttttttcataaacagtccatctcttgatctcttggtagaaagtggcttaagctaagatagtatagcatattttgcagagtttgtattaacgtctttgtgagcttcaaatcaatatgatatattgatatcttaataaatatcattgttatgtataaaataaaaatgccacttactgttgaatataatgtcaaaaaaaaaaaaa

SEQ ID NO: 181 - DNA, 3149 bp, Xenopus laevis
ggaccattgctggaatctcatccgcttggaaagatgccgctggctcagctggcagacccgtggcagaaagtgccggtgcagaaagtggaaagcgagaacgggcagcagtttgcagatgaatccatgtgtgaggaggacaatgagaacaatgatgaaggaaatataaacgaaattgcaatcacacaccatgttaaagaaggccatgaaaaggcagatccttcacagtttgaacttctaaaggttcttgggcaaggctcctttggcaaggtatttctggtgcgtaaaatctcaggaacagatgctgggcaattatatgcaatgaaagtattaaaaaaggcaacacttaaagtccgagatcgtgtcagaacaaaaatggagcgtgatattttggtggaagttaatcatccgtttattgtgaaattgcactatgctttccaaacagagggcaagctgtacctaattttggattttctcaggggtggagatttgtttacacgcttatccaaagaggtaatgttcacagaagaagatgtgaaatattacttggctgaattggcactagccttagaccatcttcattctcttggaatcatttatcgagacctaaaaccggaaaacatattacttgatgaagaaggccacattaaattaaccgattttggccttagtaaggagtctatagaccatgaaaaaaaagcatattctttctgtggaacggtggaatacatggctccagaggtagtaaatcggcgaggccacactcagagcgcagactggtggtcttttggtgttctaatgtttgaaatgctcactggtaccctaccctttcaaggaaaggacagaaaagaaaccatgaccatgattctgaaagccaaactcgggatgcctcagtttttaactcctgaagctcagagtcttctgcgcatgctgtttaagagaaatcctactaatagactaggtgctggtccagatggagttgaagagattaagagacaccctttttttgtaacaattgattggaataaattgtttaggagagagattcagccaccctttaaaccagccactggtggacccgaagacacattttatttcgatcctgaattcacagcaaaaacgccaaaagattctcctggtatcccagcaagtgccaacgcacaccagctcttccgtgggtttagctttgttgccatttcatctgaagacgaaaaccaagctatgcaaacggttggggttcatgctattgttccacttcataggaacagcatccagttcacagatggctacgagctaaaggaagatattggggtgggttcctattctatttgcaaaaggtgtattcacaagggcaccaacatggaatatgcggtaaagattattgacaagagcaagagagatcccactgaggaaatcgaaatactgttgcgatatgggcagcatcccaatatcattacgttaaaagatgtgtatgatgatggaaaatatgtgtatttagtaacggaacttatgaaaggaggggaacttttagataaaatactgcggcaaaagttcttctccgaacgtgaggcaagtgcagtgctgcacacgataaccaaaaccgcagaatacctccattcccagtgggtcgtccacagggatctcaagccaagcaatattctttatgtggatgagtctgggaaccctgagtctattagaatttgtgacttcggctttgcaaagcaactcagggcagaaaatggtttgcttatgactccatgctacactgcaaattttgtggcccctgaggtgttaaagcgtcaaggctatgatgcagcatgtgacatatggagtctgggtgtgctgctttatactatgctgacaggatacactccttttgcaaacgggccagaagatacaccagaagaaatcttagcaagaataggaagtggaaagttctctcttagtggcggctattggaattctgtttcagatatcgccaaggacctagtttcaaagatgcttcatgtggatccacatcaacgattaactgcagcccaggtccttaaacacccctggatagtacactgtgaccagctgcctcagtttcagctgaacagacaagatgctccacatctagtaaagggagccatggcagcaacttattctgccttgaaccttaatccaatgtctccagtactggcacctgttggtcgttctactctggctcagaggaggggagtaaagaagattacctccactgccctgtgaaagtcacgtcatctagtaagagcaacctggagctgaagattcacagcacaataaaaagccaacagtgaaagcacatatcataaagacactccggcaagcaaatgctcaccgtctctgccggctctcataatcaatgctgctgcttttgtctctgttctcagtagttctgtgccggggactttcgtctctaaaatggaactgtcctttggtgaatgcaacagattattcacctctgcaactgaagaatacactgaaaatgaaacaaaccaataaatctcaacgctgaacagcattcgttttataagaagtatttgtagtcctccaacgtaacaggttctaggttcacttttttttatttgagcacttgcatactctcgactcttttgttccttaaattgatttatacaacatgccactcagccttctgcacttgcttctggcagattcaactttcaagtgaaacttcttgccaatatacatctgtttttttgttttttttttattcttattagattgatcatctttgccttgtcttaatacacaataagatatagtcatggaatgattgtgtggacttgtctgtaaaagaaaagaactacaactgtggaatttctcatgaatgtatcacgacctagatcagcaacgagaaccgactcccgcatgtaactgcgggaagactgccagaatagctttcaaactgcaataagttcaagcattatgcctccagcaagcagtactaggtgtatatttgactttattatgtgtctttttgggattgtagatcagtaaccttccactttcagactttgcttctttgcttttattttattttttacggtttcttggattgaaaatgatgcatacaaccataaatatatataaatataaaaaaaaaaaaaaaa

SEQ ID NO: 182 - DNA, 6435 bp, Xenopus laevis
acgcggggagggctatagactgcagcaaggacacgggcagcacactaaaagcctccccaggacagacagccctgcccgctgctgcttcttctggtgacggagtcgcaagttgctgcttctgctgcgcgctggatatcacttcttgcgctcactctcactcctggggacgtggagcatggaccagtatcccggcactggctgctgctgcctgtcctgagccatccagctggattaacccttgggctatttcactgctgcttctgctgctgcttcagccctcttgtgccagccacttctctgtctcccagggagcaagttttcccattgccactttggattagtgggacctgagtctgcccctgcccatcctcttcattgggatatatatctgtatacatacatcttgcttatattaagcttgttggaattacaatcgtgggaaaaggaattacactttattttgcatttattatcaaagcctctgggtttctgtggcatgagattagctgcgggcacagcttggctacaatggtctcggagttggctcactttttcctgctctgtggaatcatgtgcttgactcaagggtcacgtcttcggcaagaagatttcccaccaaaaattgttgagcatccctcggatctcattgtctccaaaggtgaaccagcgacactgaactgcaaagccgaaggaaggccgactccgacgattgagtggtacaaaggaggagacaaagtagagacagacaaagacgatcctcgctctcatcgaatgttgttgcccagtggatcactattttttttacgcattgttcatggacgcaaaatcaggccagatgaaggggtctatgtttgcgtagcaaggaattatctgggagaagccgtgagccacaatgcatcactggaagttgcaattttgagagacgacttcaggcaaaacccttcagatgtaatggtagcagtaggggagcctgcagtaatggaatgccagccacccagaggtcaccctgagccaactatatcctggaaaaaagatgggactccgatagatgacgataaggatgaaaggataactataagaggagggaaacttatgatcacctacactaggaaaagcgatgctggaaaatatgtgtgtgttggaaccaacatggtgggagaacgagaaagcgaagtagcagaacttactgttttagaaaggccatcatttttgagacggcccagtaatatggcagttactgtagatgatagtgttgaattcaaatgtgaggcccggggcgatcctgtccctactgtccgatggagaaaagatgacggggatctgcctaaatcaagatatgaaatccgtgatgaccacaccttaaagatacggaaggtcacagcaggagacatgggatcgtatacttgtgttgcagagaacatggttggaaaagcggaagcttcggctgttttaacagtgcaagaacctccaaattttgttgtcaaacctcgtgaccaggttgttgctttgggacgcacagttacatttcagtgtgaagccaccggaaacccccagccagccattttttggcaaaaggagggaagtcagaaccttctcttttcctaccaacctcctcaatcgtcaagccgcttctctgtgtcccagacaggggacctgactattacaaccgtgcagaagtctgatgtgggctactacatctgccagactctcaatgttgctgggagcattacaacaaaggccttcttagaagttaccgatgtggtggccgaccgtcctcctccagtcattcgtcagggacctgtgaatcagacagtcgctgttgatggcaccttacttatgaactgtatagccagcggcattcccattcccacaatccactggagaaaggatggtatcctgataccgacccaagactctcgcattaaacagcaggactcgggagctctgcagatccgttatgccaagcttagcgacaccggtcggtacacctgcactgtctccacaccaagcggggaagcaaactggagcgctttcatagaagtccaagaatttggggttccagttcaaccacctcgagccacggatcccaatctgattccaagtgctccatcgaagccagaagtcacagacgtcagcaaaaatactgtgactttatcttggcagccaaacctcaactcaggtgccactccgacgtcgtacctcatagaggccttcagccatgcgtctggaagcagctggcaaacagtggcagaaaatgtcaagaccgactcctttgcagttaaaggattgaagcccaatgcaatctacctcttcctcgtgagagcagtgaatgcatatggattaagtgatccaagccaaatatccgatcctgtaaagacacaagatattcctcctacaagtcagggagtggatcacaagcaggtccagagagaactgggtgatgtcgttctacaccttcataatccaacgatactttcctcttcttccattgaagtacattggactgtggaccagcaatcacagtacatccaaggatacaagattctcttcaggccaagctcagaaaatcgaggtgaatctgcatggtccatatttgaggtcagaactccggccaaaaatagcgcggttatccctgaactgagaaaaggtgtcaactatgagatcaaagcccgaccatttttcaatgagtttcaaggggctgacagtgaagtgcggtttgccaagacgatggaagaagcacccagcgctcccccgcagagtgttactgtaaccaagaatgatgggaatggaactgctattgttgttgcgtggcagcctccccctgaagatactcagaatgggatggtccaggaatacaaggtctggtgtctgggcaatgagagtcgctatcacataaacaagaccgttgatggctctaccctttccgtggtcatcccgtccttagtccctggtattagatacagcgtggaggtggcagccagcacaggagcgggatctggggtcaaaagtgagccccactacatccaattggattccttcggaaacccggtgcctccaggggaccaagtcagccttgcccagcagatatctgatgtggtgaagcagccggcgttcattgcagggattggtgccgcctgctggataatcctaatggttttcagtatctggttataccgccaccgaaagaaacgcaatgggctcaccagttcgtatgcaggaatccggaaagttccgtcttttaccttcacaccaacagtggcgtaccagcgaggaggggaagctgtaagcagcgcaggcaggcctgggctcttaaatatttcggaacctgctgctcagccgtggctggcagatacctggccaaacactggaaacaatcacaatgaatgccccatcaactgctgcacctctgggaatggcaacagtgacagcaacctcaccacttacagtcgcccagcggactgcattgcgaattacaacaaccagttggacagcaaacagacaaacttgatggtgcctgattcagctgtttatggggatgttgacttaagcaacaagatcaatgagatgaaaacattcaacagccccaatctgaaagatgggaggtttgtcaatcccgctggccagcccaccccttatgccaccactcagctcatccagtcgaacataagcaacaacatcaacacatcagctggtgacgtggacgaaaaacactggaaacccccatgtcagcagaaaccggatgtcactccaatgcagtataacatcatggagcaaaacaaaatcaacaaagattaccgtgcttcagacactattccttccaccattccctataaccagtcccatgaccagaatgctggagggtcttacaacagctcagacagggggagtagcacatctgggagccaaggacataagaagagtactcgtaccccaaaagtatcaaaacaggctggcatgaactgggcagatctcttgccaccaccacctgctcatcccccaccacatggtgccactgaagactatacgttgtcagcagatgaaagctatgacagagcgttaccttgcccaataccacctacaaggatgtatctccagcaagatgaacttgaagaggaagatgaaaggggcccaacacctccgataagaggagctgcctcttcccctgctgctgtgtcctacagccatcagtccactgccactcttaccccatcacctcaggatgaactccagccaatgcttcaggactgtccagaggagattggtcatcctcaacatcagctagaacgaaggcgtcatcaaattagtcctcctcctcctcctaggcccatttccccacctcatacatatggttatatttctggaccaatagtctctgatatggatactgatgtacctgaagaggaaggggatgatggggaaatggaagtcaccaagatccaaagtcgaagacatcttttacgtggcctagaacagacacctgcttccagtgttggagacctggaaagttctgtgactggttccatgattaatggatggggctcagcttctgaagaagacaatgtttccagtggacgatccagtgtcagttcatcagatggatcatttttcacagatgcggattttgcacaggctgttgccgccgccgcagaatatgccgggcttaaagtagcgaggcatcaaatgcaggaagcaacaggaggtcgaagacctttccacgcatctcactgtccaagaccaacaagcccagtgtcaacagacagcaacatgagcactgctgtcatacagaaaagccgtcctgccaaaaagcaaaaacaccagcagggacatcttcggaaagatgtctacacagatgatttgccaccaccaccactgccacctcctgccatcaaatccccaactggtccatccaaagcacaactagaaggacggcctggtctgtcacagaagtaccttgttgctgaacaaagactggaaaggccaggggagaggaaaggtgtcagctacagaggcagggaaggacctgacagcagacaacaacatgcagaagcaagaaccaattcgggagagagaagagagtcttcagaaaagcaacttgatggaaagatgagaaaagggaaagctttaaagtgggatgggacacctacaataacaaaccaaatgcaagaggatatattaccctactgcaaaccaacattccccacatcaaacaatccccgggatcccagttcctccagctcaatgtcctcaagaggatctggtgggagacggaggggagaacaaacaacaggtcgcagaaatgcagcagagatgcaactcttaggaaattatgaacaaggagttgatgaagatgaaatagaggaaacagaaagttgaaggcaaaagatggatattcttttggaaataaatccctcaagatgcctcaagaaaaatgacattatgccagagttgctattcagtgcaatcaaattgtgctcattctttcattttatatccatgataccagctgaacacatgtttgcttcattttgtttacaccatctcctttttgtattagtccccattgccatttccccaaagcagcacttaccatggcgccttcatattcttcctgctgcaaaagacaggtagccagctgtctgagaactcttatgccaatactgctcttgagattagacagcagcagttaccgagactggaatcctaaacttaaggctgaacaagcctatcacgtccgttgcctattgaatcgtgagaggaggcggtgcagtgcattgctccaaacccaccaaagcattgatgttcatcagtaacattttaatgatttcaaacaaccacttacacaatgtgcacacttttagaacatcttcaagactgtgtgtctggctggattaagtggaaaatgcatttttgcagagttttcaatttgaacgtaaagattactgttaaagcagtattgcaatttcatccgtatgtaccaagtatggaggtgattgcattgtaaataagtacttttttttgtacgttcctgtggtacttgtcttccccatcttcatctttaacctatgtttgatattacatcttcttgatatgtggaagtcaagccagaaaaaaaacaaacaaaaaaacctggtggtcttgggtaatttaaatggaaatctttaaaaaaaaaaaaacaaatttatttttccatttaacaacatttgtaggaaaaccaagaaaagaaaaaaagaactgtaccatttgtaatgaacaccaagcaaggaacttttattgttagtagaactggacaggtcctgcgccaatcccaccggggataaaagaaatgtgccacttcaggaaatttggtttgatgttgttattttgtaatgcactgttttgttggttttaaaagcacaatcactaaactttatttttaaaccataaaaaaaaaaaaaa

SEQ ID NO: 183 - DNA, 785 bp, Xenopus laevis
gcacgagagccggcgagttttcccgcatgcgctaactgctgccagcttgtggttcagggcaaagctttcagggcgtcccagcgtagcgtggaggggcgtggcaaaatgccgagcgtacgccgtcttgttgggtgacgtagttgcccctagtaacccgagagtcgctgtaaggatgggtttgttgtctattttgcgtaaactgaaaagtgcccccgaccaggaggtaagaattctgctcctgggattagacaatgccggcaaaaccacactgctcaaacagcttgcatctgaggatatcagccacatcacaccgacacagggttttaatatcaagagtgtacaatcccagggtttcaagctcaatgtatgggatattggaggacagagaaaaatcaggccgtactggagaaactattttgaaaatactgatgttcttatctatgtgattgacagtgctgacagaaaacgatttgaagaaactggtcaggaacttgcagaacttctggatgaagagaagttaagtggggtccctgtgctgatctttgcgaataaacaagatttattgactgctgcaccagcttctgaaattgctgaaggcctaaatctgcacacaatccgggatagagtttggcaaattcagtcatgttctgccctcacaggacaaggggtacaagatggaatgaattgggtctgcaaaaatgtaaacgcaaagaagaaataaaagcagatcgataaataaatccaagggacagaaaaacaaaaccaagaaaaagtgatgtcaaaat

SEQ ID NO: 184 - DNA, 2138 bp, Xenopus laevis
aattcggcacgagggcagcagcagaagccgcagctctcgtcagcccctcccgccgtcgccattcctcgcccgcccggctctctccttccctccctccccggggcctctcgcctccggaccgttccttcctccccattcctcccttgttttcctaccccctctccccattttctttatagttctcacaccttacggcggtcacccctcgtcctttgtaactccgcagtcttgtctcatcctgtgaccaaagatttgactactttgtacagcttctgacaatagccctgatccaacagaactagaattatcatggacaccagtgtgattgaaggaggcctgaatgttacactcaccatcagattgcttatgcatgggaaggaagttggaagcattattgggaagaaaggggaatctgttaaaaagatgcgtgaagaaagtggtgctcggattaacatctcagagggaaattgtccagaaaggataataaccctggcaggtcctacgaatgccatctttaaagctttctctatgataatcgataaactggaagaggatatcagcagctccatgaccaacagcactgcatctagcaaacctccggttaccttgcgtctggtggttccagccagtcagtgtggatccctcattggcaaaggaggttgcaaaataaaggaaattagagaaagtacaggggctcaagtacaagtggctggggacatgctgcctaattctacagagcgagcaatcaccattgctggcattccgcaatccattatagagtgtgtcaagcagatctgtgtagtcatgctggagtctccccctaaaggtgtcaccatcccataccggcctaaaccctccagttcacctgtaatctttgcaggtggtcaggtgtcgcgccaagccggagggcacgcatgtgagactgacctgtgggaggggcgaaggtcccacacagggggggtctccctagatgctgtggatctccatggggcttacaccatccaaggacaatatgccattcctcagcctgatctgaccaagttgcaccaactagcaatgcagcagtctcactttcctatgtcccatagtggcaacactggattcagtggtgggattgatgcttcagctcagacgacatcccatgaactcaccattccaaatgatctcattggttgcatcattggacggcagggagctaaaataaatgaaattcgtcagatgtctggggctcagataaaaatagctaaccctgtggagggttcaaatgatcgccaggtgaccatcactggatccacagccagcattagtttggcccaataccttattaatgtcaggctttcctcagaagccggtggcatgggaagcagttagacgtcttcagcatctcctgtttagctcactgtcagtctgcacatactgcaaacagctttttttcaggttttaactagtttgcaaacagtttccttttgctttctctcttccactcgtggttttttgaggatatttttaattaaattttcccccttccagctgttaaaacctgttgatacagattttagttttctaaaagtatgtcctgtaccctatgaattttttttttttttttttttaaggtttaaagtcacattgtaaagagtggggtaataaatgcatttcaatttagttctgtaatgtcaggattttttcagaaaacaagtaaataaagacagactggaacttgtgtggcctttcttctttgttcttattctggatccattgctaatgttcagtttttagtaaagagcacttttccatgaaaatgaacttgtagtgttctcagagcaccaacttgaaaaccacagagtttgaagctttttgttttctgcccagaactgtctctttaggtgttttgccaacgtgctgaactacctacgtaatcaattgttccaattgtgtattctttaaagcatctctaacacgtgcgctctttaaatttaaggagcgatgtctctttaaaggggtattagcccaacatttttttttttttttaaatctttaatttttatgcagaattggtgctgtacagttttctgttactaaatatatatacagtttaaataaaattacctatttaaaactgaaaaaaaaaaaaaaaaaaa

SEQ ID NO: 185 - DNA, 2759 bp, Xenopus laevis
ccttttcctgacaggattttgggttccagtctctgcggtgtctccccttgtctggagcttcccgagcccctgactctgcccctcagccggtaatatgcacgtcatcaagcgagatggaaggcaggagcgtgtcatgttcgataagatcacgtcacgaatccagaagttgtgctatggactcaacttggagtttgttgacccagcccaaattactatgaaagtaatacagggtctttacagtggggtcacaactatagagctggacacgcttgcagcggagacggcagccaccctgacaactaaacatccagattatgccattctggctgctcgcgtagctgtttccaacctgcacaaggaaacaaagaaaatatttagtgatgtgatggaagatctgtacaactatgtgaatcctctaaatagcaaacactcgcccatggtctcgagggaaacccttgacattgtgctggcaaataaagatcgtctcaactcctccattatttatgaccgtgacttctcctataacttctttggctttaagacactggaaaggtcctacttattgaaaataaatggaaaagtggcagagcgaccacaacacatgctgatgagggtatccgttggcatccataaaactgacattgatgcagctattgaaacctacaatctgttgtctgaaaaatggttcacacatgcttctcccacactgttcaatgctggtaccaaccgcccacagctttccagctgtttcttgctctgtatgaaagatgacagcattgaagggatctatgacacgttgaagcaatgtgctctgatctcaaagtctgctggtggtattggtgttgcagttagctgtatccgtgccactggtagttacattgctgggacaaatggcaactcgaatggccttgtaccaatgctgagggtgtataacaacactgcacgatatgtggatcaaggtggaaacaagaggcctggtgcatttgccatatatctggaaccgtggcattatgatgtgtttgatttcctggacctaaaaaagaacactggaaaggaggagcagagagccagggatctattctatgccatgtggatacctgatctctttatgaaacgtgcagagaataatctggattggtctttaatgtgtccccatgagtgtcctggcttggaagaagtttggggagacaagtttgaggagctctacgaaaaatatgagcgggagggacgaacccgtaaggtggtgaaagcacagcaggtatggcatgccattatagagtcgcagactgagactggcactccctacatgctgtacaaggatgcctgcaaccgcaagagcaatcagcagaacctgggcaccattaaatgcagtaacctgtgcacagagattgtggagtacaccagtgacaaagaggttgccgtctgtaatttggcctctttagcattgaacatgtacgtgaccccagagcgaagttttgacttcaagaaactggctgacgttactaaagtcattgtcagaaacttgaacaaaataatcgaaataaacttttatccagtgccagaggcagaatattccaacaagaagcaccggcctattgggattggggtgcagggcctggcagatgctttcatcctcatgagatacccatttgagagtgagaaggctcaaatgttaaataaacaaatatttgagaccatttattatgctgcactggaatctagctgtgaactggccaaagagcttggtccatatgaaacatacgaaggatgccctgtcagtaaagggatcctacagtatgacatgtggaacgtaactcctacagatctctgggactggactgccttaaaggagaagattgcaaagtatggcatcaggaacagtttgctgcttgctccaatgcccacagcttccactgctcaaatcctgggcaataatgaatccattgagccatataccagcaatatatacacacgcagagtcctctctggagagttccagattgtgaatccacatttaatgaaagacctgactgagcaagggctgtggaatgaagaaatgaaaaatcagattatcgccaacaatggctccatacagaacgtcccagatattcctgctgatctgaaagagctgtacaagaccgtgtgggaaatatcacagaagacagtcattacaatggcagcagacagaggagctttcattgatcagagccagtcattgaacatccatgtagcagaacccaactatggcaagctgaccagtatgcacttctatggctggaagcagggtttgaagactggcatgtactatttgcgcacacgccctgctgccaatcccatccagttcacacttaataaggagaagttaaaggaaaaggagctgatcaccatggagactacagagaaggacaaagaggagaaagagaagaacaaggcggccatggtttgctcgctggagaacagagatgagtgccttatgtgtggctcataggggagttgctctgtttcaatgagtcttgtgtagatctgataagagactggaaaatcttgtgccgtttctctgggcccattagacacttccctgcgggtagcttttattcctggactcgagtgtttctagggcctgtcgagagatttaagagttactgtggcaccaaccacaaatctaaaatattaactggagcttttgcctgtttttttcagaaaaaaacattaaaataggaataaaagcaaaaaaaaaaaaaaaaaaaaaaaaaaaaaaa

SEQ ID NO: 186 - DNA, 3513 bp, Xenopus laevis
agtgttgtgcgagcagctagcagggaactgacgacccgccaccgacgagcctgccactagcgctgaaggggagcagcctttgcccttgttgcccactgggcactaagactttaggagacgcgtggtgggcgggcactgtccctgttggcactgtccttattacagggcggggggaatggaggtgcacatagggctcggcggggtatacaaacagcctcccgggaagatgatcagaggcgcatttgagaacctcttcctgagtgtgcgggaggcgctacaaggggagcgtagagccctcgagggatcccaggcgcccgcaggttggagcgaagcccccggcacacaccgctggagcgaagcctctccgcaagacgggacccccctgaatccctgggtcacacacccgcctgccccttggagagaggctcaagcagaagcagcgccgcaaaatcccgcgggtcgcacagaaggtgcgcagttccctgcgctgggagactgtcccactgagctgaaggagatcctgggggagcagagcggaagaatactggagagcgaagagacccccgccgagaaggaaggtttctcggggccccccgaaggcatctctgatagcgccaaggagctgtgcaaagcggtgtccgtgtccctggggctgagcatggaggcgctggagcatctgagcgcaggagcaggggaggcgcagcagagaggggactgtatgtacgcgcacccgccggacacccacaagtgccaagtggcagaggaagacaagagcgacacccgggacgggccattcaggaggagcagtcagagcaactttgcaactggcaagagcccagaggatggcggcggcggcggtggcggcagcagcagcgcggggggctcggaagagaaggagcagccctgcacagacttggcactgccagagccggccggagggtacagacaccgagctatggagctgacgcctagcctcaccctgtacaagcccactgccttcatggaggagagccctggatatcccagcagagacttctacagctttcagatggcgctggcacctcacggccggataaaggtggaaaaccccatggagtacggcggcggcgcttggggggcagcgggcaggtacagcgaactgtcaggctttgcccattgcggtgccaccgccggctggcacactctctttgaagaaggtcagtccagcggctcctttgccgaggccggtccctacagctaccctcgcagccacggacctgccggagctgatggcgaatttccctccgacgcctggtacccggcaccgaccatgataggcagggtgccctacagtgggcccatgaagaccgagatggcaccttggatggaaggataccctggggcctttggggaaatgaggcttgaaggaggaagagatcacctgttgcccattgattattacttcccaccgcaaaaaacctgtctgatctgtggcgatgaggcctctggctgccactatggagcccttacgtgtggcagctgcaaagtcttcttcaagagagcagctgaagggaaacagaaatatctttgcgccagcagaaatgactgcacaattgacaagtttcggaggaaaaactgcccatcttgtcgcttgaggaaatgttatgaagctgggatgacattaggagctcgaaagctaaagaagctggggaaccttaaggcacaggaagagttggatggatcttcagtgcagggagaaggaagcaaagaactctcccctggtatgggtattccacagcttgagggctacagctgccagcctatcttcctgaatgtgctggaggccattgaacctgttgtggtgtgtgctggacatgacaacaaccaaccagacagctttgctttgctcttgagcagcctcaatgagcttggagagcgtcagcttgtgcacgttgtaaagtgggcaaaggctttgccaggtttcagaaatctacatgtaagcgaccaaatgaccgttattcagtactcctggatgggactcatgatatttgccatgggttggagatcattcaagaacgtcaactccaggatgctctattttgccccagacctggtgtttaacgagtatcgcatgcacaagtcacgtatgtacagtcagtgcgtccggctgcgacacctctcacaggagtttggctggcttcagatcactccggaggagttcctctgcatgaaggctctccttctctttagcattattcctgtggaaggtctgaaggaccagaagtgctttgatgagttgcggatgaattatatcaaggagctggacagagtcatctcttgcaagaggaacaatccagcatccagctctcgacgctttttccagctcaccaaactccttgattctgtgcagccgattgcccgtgagcttcaccagttcacttttgacctgtttgtgaaggcccagatggtgagcgtggattatcccgaaatgatgtcagagatcatatccgtgcaggtgcccaagatcctgtctggcagagtcaagccactctacttccacatctcatgagatgcccaatgggggtgagccccataataccttgcagtgtgccttaagggtcaccatatgcaaaaaggactctatcaaggactttcagcacgccagtgcaagaggcatgtcctctgagcatcaccctagctgtatattcttctgcagaatggggtcttactgtatttacaatgccctctgtgtgatttggcactgacccatgggttataggaggactgctgctcttggcataagtgtttttattcccaatttacaagggttttgtcacctgtgtatgcagcagaaagggatttcaggtctggaattcctggggcactgcaagacttacattattagattatacttatatacacaaacatgcttgtgtgccaataccagtgcacacaatgcaggactgaggccacacatatacaggtctcaaagtgcaaaatatatataacgcactataatgggtttccttcatccatgttgcagacccccaactcaccagcatcttgccggagggttacagttctgcaactcttggagtgacaaaggttgcctgtccttgtaacagagcgtcgcattcccaactctctggctgaaaagtgcagctccaaacacaagcccttctgtataattttttttctatatcttctaacctaattgattctgactgtgtgagctccttttgcagccagaagactttgggtagcaatttttatattaagggggaaaaaaagttgtgctaaactgcttctgtctcgatagagtctgcatattttatccataacgttgtgctcctgtttgttccggcttctccaatgaattcagccacaaaactggcttttttctgctcaagggcatgtatagagatttccctaaagcagcctctttttataggggcgacctgctgatgcttcatttgtgcctctggagtggcacttgctaaatgtcataagataactacagaattcctgcagccc

SEQ ID NO: 187 - DNA, 1624 bp, Xenopus laevis
ctggtgcccggggattcgttgtatggatcgcactcccctactgtaacttctcagctcggatctctctgtatggccccggctctgcttatggcttcttaccagcctggggtgaaaatagaagaacgtcccttgaataggatgcaacaaactggtgtgaagccgtccctgggcgaggacaagcccaaagtgcccgggatcctgcctttcagcgtggaggccctcatggccgataggaaacctgggagagaccgggacctgtctagccccactggatctccgctggcaggaacatcacacagtcccagggtgggatctattgcagccggagagacccccaactccccaatttcacttggaaaccgttaccctgtaggggccattatgcaactgccagaggagacgctgctcaagcctgagagtcccgagagaagctcatggatccaaagcccaagcttctcaccttccccaacaagaaggatgagcccacccgcctgccctttgagaaagcacaaaaccaacagaaagcccaggacccccttcactacatcccaactgctggccctggagaggaagttcaggcagaagcagtatctgtccatagcagagagggcagagttctccagctccctcaacctcacagagacccaagtgaagatctggttccagaacaggagagccaaagccaaaagactccaagaagcagagctggaaaagctaaaaatggctgctaaacccatgctcccccctgcatttggtatctccttccctcttgggaccccagtacccacagcctccttgtatgggacctctaatcctttccagaggcaggccttgccaatgtctcctatgggactttacacagcccaccttggatacagcatgtaccatctgtcctaagacttgtttatgctccattgagactgtgggaaagaagacttgagtgattttttcttgcactccctatattttttcactatttatgagttcctagggaattgaattgtagaaatactatgtcacttcaatatgcctattgtcatcttgttagctgtgtctaaatcatgagttccaggtgtcttgctcactaccagcttcccaagttcttatcccagtccataaagtatcagaaccgaggggatatctgtaaccttgaaagcaccaaacccactgcttcaggagttgtcctacattgtagggaaaggcttcccagcaaaggtggtgagcagtgtaaatattatattataatatggtgcaaacaggattgagagtttgtgcagaaaaaatccataataataacccagactggggtaagagcacaattttgggtgggaccagctgctgtttaactgtaatttatgggagcttggcacctccacagaatgacaagattgataaagggagttaattatctcttacatataagagatacgtgtaaaatagtattgaaactttcacttaacagcactgtctgtttgcgtttcgttattgcaattatatccctttggaagggagtgtatgtaatatgtaatatattgtacatttgaaatttattatcctttatattatagctatatttgttaaataaattaattttaatgtaaaaaaaaaaaaaaaaaaaaaaaaa

SEQ ID NO: 188 - DNA, 2157 bp, Xenopus laevis
accggcagcgccctcttcttccctccagcccgtgagtctgggccccgctcccagggagacatgaagccgtgagcccgagacagcagcgaatttgggggaagatgacggagtacaagctggtggtggttggtgctggaggtgtagggaagagcgccctgaccattcagctcatccagaatcattttgtggatgaatatgatcccaccatagaggactcgtataggaaacaagtggtgatcgatggggagacgtgtctgttggacattctggacactgcggggcaggaggaatacagtgcaatgcgggaccagtatatgaggaccggcgagggattcctctgtgtctttgccattaataacatcaagtcctttgaggatattcaccattatagagagcagatcaagcgagtgaaggattcggaggacgtgccgatggttctggtggggaacaagtgcgacttaccctcccggacggtggacaccaaacaagcccaggacttggccaggagttacgggattccttttatcgagacctcggccaaaaccagacagagagtggaggatgctttttatacattggtgagagaaatccggcagttcagattgaaaaagatgagcaaagaagaaaagactccgggatgtgtgaaatttaaaaaatgtcgggtaatgtgacgggggcgtagacgacgctttctacacgttggtccgagaaatccggaagcacaaagagaagatgagcaaagacggcaaaaagaagaagaaatctaaaacaaagtgtataattttgtgaataatcctccccccccaccaccacattgagtttaggcatgacgaccccccccccccccccacgtgatagttttgtacattacactaaattatttcgcatttgtttaccgattattttgcttttgttggttggtccgtcatgcgattctacggccgctccttctattgcttccagatatctaaagccgattggtggctttggattgggcctatgatgcaatacgctgaccaatcgggtctctcggcacaatgtccggcatcgctccctggacttggagcggccagaggtttacagatgttattggcagcagatacccaacaaagtgaaaactgtaccccaaaatgtgacggactggtgctatgagactctttatatttctatacatccgacgctccaatcagtgccaacgtttacgccctattttacggatcgacctatcggctgaggtgccaatactaaaaatggaggggttggctttctccctgtctttattacaagtagatgttggggatcctctacttgtgcaccttaattaaattaaatcactgcacaacagaacaagaaaacggtttatcccccccgaccccggtgtccgttacgtggtctctacactattgctcaaaaatgagccggaccactggttccgccatgaaacccgtccccccccctcaaaccctaaattaaaggttccagtcaggctgtttatcctgggtgcaaatagcaatggtctggcccagaatatcagatataatgtttatttgtagccagtgaaaagggcctttttgggaacagactgacccactatggtttaatagcagggaggttgtttatttgggacgttattaaaggctcatgttataaatagagagacataacaccccccccctgggcaaatattagtgagcgacgcctcgttattgtatttgtcgaacaaataaaatcctcgcggaagccgatggtgaataatcttataattccatctgttgctgcagttttattataaacctccccctcctgtgctgtcgtcttactccggatcggggctttttgcatttttggtgccccccccgcatggaaggaggagccttgtatgtttacctggaatgtattttaactatttttgtatagaaacctgcacatttttgtacatttgtgctttttatttgaatccaatgatacgagtgtgtttgtatttggccccggggccgatgacacgattaactacaaactgaaatgaccactgtcctaacggactttttcttttcccccttcatattttaggagtatattctgtgtgatattgtcaataattctgtttctgactgtaatgctcctatttattgaaatgtaataaattgcgttctggtg

SEQ ID NO: 189 - DNA, 977 bp, Xenopus laevis
gtgcgagtgtaactgacagaagatggcagggggtctaattcgaggcaaactgatagctattatcggggatgaggacacagtcaccggcttcttactcggtggaataggggagctgaacaagaaccgaaaaccaaattttttggtggtggagaaggagacgagcgttaccgagatagaagagacgttcagaagttttctaaatcgtgatgatatagggattattttgatcaaccagttcattgctgagatgattcgccatgcaattgacgcgcacacgatctccatccccgcagtacttgagatcccttcaaaagaacatccgtatgatgcaaccaaggactctatactgcgcagagccaagggaatgtttacagtggatgatttgcggtaattcgggaaacaaatgcagggatcttccatacttcagatcctgccggattccttatttggttgtatgggtgttaaatctcgattataaaattaaaatggaattgtctctcctcatttgtgtttacatgctgtgtgttatctcctcaactgcaaatgccaaatttgctttgccccctttttgttaaagtctgtagtgtctagaaatgtctccatattgcttttgctcagctatagactatttgatagactatttataattaatttaaaaaatatttaaatgctcattaaggttactgagaggtcagtgtttggcagcttaccccatctacatttaaatgtgtacagtggctactataaatgtttttgggactgtactactggaacaaaatgtcaatgcttataagtcattgttggtaatcctaaaatatatatgaatcccaaccacataaggaatggcaccaaaaaccgagatgttcagtatgtctttaccttataattgaagttgtgatggttttcctaataaaatatattcttatagaactataaaaaaaaaaaaaaaaaaaaaaaaaaaaaaaaaaaaaaaaaag

SEQ ID NO: 190 - DNA, 3304 bp, Xenopus laevis
agagaacgaagagtccagtgacaggtagtgagagagagagagagcaaagctcaagcacaagggaaggacaaacacctgcatttggtcacagactgagagagaggcaattcggggcacagaccaagttcatgcctagtgggggaagcggcgctagagagagagtaaaagtctgacagggggaagcctctcagggacagagagagagagagagagagaggggtccgagcctacactaaagcctctagaaatgcatgaaaatcactttcttatgtcggccctacagccgcacaatgacatcacgtcactggctctccccaccgactcccagatggaccggcggatgcgagaagagagtctggcgctgcgcaatgcgcgggtacaagagcaggtgcgcgcaaagatgatgcagaagacgcagacgacccctcgggtgagcagcaacagcaactactccatctccagctatggggataccttcatgcccagaacacaatatggatctgcgtcggcatcttacagttcccgctcacaggtccttagcagcgagccaaagatatctactggtcgtacttcagcatattcagtggtgggaggaggaggaggaggaggaatgcgctcgggctactcatctcgttccgcagtcgatattggtggcacccagaggatcagtgtagcttctcaacaacgtggttactccacttcccgcccaaactccttccatgagaaggtatacccagcccgtagagattacgatacaatgtctctacgttccctgcggattggagatggagaggagcgctacaatcaggggccggcctctcagtcaggattttatgggcgccaggtttctacttccagtgctggaccagtgctccagagatctctgtcaggcaacattgggcaaaatggcggaggcacttcttgggtggaaagggccgaggtggcacaaactagaactatccgtgcccctgcaatgcgcaccctccagcgcttccagagtaccaaccgcgcccgaataggatctgctccctatggcactattaatacaggctcccaacagcaaatgcaacagatgcaacagatgcaacagatgcaacagatgcagcaatcatcaagcaacatgggctccacctatgtaacaaacatgatgggacataattctagggctccttcagtgcggagccttgctgagtccggacaccaagtgcaggaaattagaggcatcgatatgtttgatgggaacaaaagtttgatgagccagcactctttcactagtgggtttgatgatatggacatgccaatggcagtgaagcatttaatggcttctgatccaaacctgcaggttctgggtgcggcttatatacagcatcgatgctacaatgacagcgaggccaaaaagcaggcacgcagcgtgcaggccatccccaaactggtaaagctgttcaactgcgataaccaggaagtccagcgccatgctacaggcgccatgcgtaacctcatctatgacaaccctgagaacaagatggcgctggtggaggagaatggcatttatgaactgttgaccgctttggaagagcccgacgatgaactcagaaagaatgtaacaggtatcttgtggaacctgtcatcaagtgataatctgaaagcaaggctggcaagggacaccttaaacccactcacgcagaaggtactttctccgctttctggaacggctggctccgctgttatccaacagaatgtttcggaatcggaaatattttacaattctactggtttcctcaggaacttgagctcagcaagccctgagacgcgtcagagaatgcgcgagtgccccggtcttctggactccctggtctcctacataagcaatgctttgcagtctggcaagtctgaagacaagagtgtagagaatgcagtgtgtgtactgaggaacctgtcttaccgcctgtacgatgagatgccaccatccagcttgcagaggttggagggcggccagagagggcgttccacagtgggtgatacagtggggtgcttcactccccagagtcgcaaacttaaagagcagcagcagcagggtgcagacattgccaccttcacagagatctcaagggatcccaagggaatggagttactatggcacccgcagatagtcaatctgtacaaccggttgctgcagcaatgcgaactgaacaaatacaccacagaggcagcggcaggagccctgcagaacatcaccgctggagaccgcaggtgggcatcggttctgagtcaggtggcactggaccaggagcgtattttgaacccagttctagatcgtttgcggacagccgatcacaaccaactgcgctctctcaccggcttgatccgcaacttgtctagacatgccaagaacaaggatgaaatgtccaccaagctagtgagccatcttctggagaaactcccagccgattcaggagagaaaagccccccggcagatgtgctggtgaatatcattgccattctcaacaacctcactacggctgggcccctcgcagcccgagatatcgtctacttcaatgggcttggcaagttgatgtatatcaagaagatgaaagacagccctgacggtgacaaggccgctcgggccgcctgtagcctcctcaccaacatgtggcagtacagcaagttgcatcgggaatacaaggcaaaaggatatcggaaggacgactttctcagcgcgtgatgttgctctgccgctggatcgctctcccctctcctctactaagaagacccgaccaacattaacccgaggtcctcgatcttcctaaacgccacttcccgttattcgctctgcctcgtttcatgcagccgagcagaggtggaggtctttgtagatagattgattgtttgttttttttaattttgtattggggaatgtgcatttgtgggccgtgtgcatcgggagggcacattcgctcatgtaacacttggccttattgggatatgcagatctctgctgccccttcacttcctgtgaggtgcgtagccaaaaccttcctttcctgtttcctaagggccatctgcaatgtttgcttcagataagggtgggagatagaagataactggctgattacactgatcctcaaggaccttcgtttttttttttcgtaacacaaaaatgttgatgctttttatctcaggggagtatttaagtgggtgcgcttgcttctttacctcactcacaagtgccttcttccttccagtgcaaatctaataacattgagggccgtggctccatcaataaaatacacaatttgacttaaaa

SEQ ID NO: 191 - DNA, 1141 bp, Xenopus laevis
acgcggggggcgggaagtggagtgagaggaagagctcggttgtttatttttcctgtcagtgaggggctccgaagtgtggccctaagctgtagccaagtgcaatggccgagagacccgaagatctcaacttgcccaacgccgtggtcacgcggatcattaaggaggctctcccagaaggggttaatatctccaaagaagcgcgcagtgcaatatcccgggcggccagtgtctttgtactgtatgcgacatcttgtgccaataacttcgccatgaaggggaagcgcaagactctcaatgcgagtgatgttttggctgcgatggaagagatggaattccagcgatttcttacacctctgaaagaatccttggaagtttacaggcaggatcagaaaggtaagaaagaggccacagagcagaagaagaaagacaaggagaaaaaggccgactctgaggatcaggacaagagccgggaagaggagaacgaggaggaagatgagaagatggaagaagatgaagtagtggaagaggaggaagttgagaactgaccacaagacaacatgacggaactttgtggcccctccctgggggtccttgttttgccgtgtcacatgattttgcttcctatacaatgagatttgaggtgggactgcgcggccgacttggatgcgtttccgtcgggtccgacgctgggcgacagaacgccagcgttcgtccgatgcgacacaactgtcagatgcagtggcagcatgcagtgtttgcatacgaacgctccgactccatgcaacttttgtattaattaccttgtttcccatcgcatccgacttgacgcgggcgttttgtcgggcggtgtcggatccggcgggggcgcatccgggtcggccgtgtagtcctacctttaaggttggatttatttactgcatcgctgccaaagaggttgcaccactattaccctccaacccaagggctgtgggtgcttattctctcctgggcctgtgctgttagatggcagccctcctatggtttacatgtggcacggtgcccggcaggcagctctatacccagtgtgatgggagtcgttgtatatcagtggagattgtgatattaaatgtttcttttgcaaaaaaaaaaaaaaaaaaaaaaa

SEQ ID NO: 192 - DNA, 1779 bp, Xenopus laevis
cctccctttacaccatcctgcaagctgtgcgcgtgcccgctcctagttaggcgtgtccccgtgtggctttgcgggcagctgttagggctatttttttgttttatttttttccgcgtcgttttggtgttgctaatttgtttttccaacgaagaaagaggggggttctccgcaaagaaaaaaaagaagaatctgagtgaacgtcggggtattttgagggctcctagtgggaaagaagtgaagttgtcgataaaggagacacatgcagatagcctgcttcactgtaaccattatgctcattgaacagaagtaggtgtacagtcattggaacagggcttgagggacgcgatctggcacctgtaaagcaaaaaaataagacatcaatcacatttagcagttgaagaccagtaatactggagaaactctatacatgctcaggaaagcagactgcactgttgtgaaacaaaaataatcccattatgcgcgagtacaagctcgtggtccttggctcaggaggtgttggaaagtctgctttgacagtacagtttgttcaaggaatttttgtggaaaagtatgacccaacaatagaagattcttacagaaagcaagtggaagtggaaggacaacaatgtatgcttgaaattcttgacacagctggaacagaacagtttacagcaatgagagatttatacatgaagaatggtcagggttttgcactagtgtattcaatcacagcacagtccacatttaatgacttgcaggacttgagggagcagatactgcgagttaaagacacagaagatgtaccaatgattcttgtaggcaataaatgtgatttggaagatgaaagagtagttggcaaggagcagggacacaatctagccagacagtggaacaactgtgcctttttagaatcttcagccaagtctaagatcaatgtaaatgagatcttttatgacttggtaaggcaaataaataggaaaactccagtggaaaagaagaaaccatcaaagaaaccaaaatgtctgctgctttaggacctcttcaaacagcagctctgagccaggttataggaatgaagaactgttgcctagttggaaagtgccagcattccaaaaaataaaaaattcccaccataaatgaacatatctgaagaggcttctcttgtattatgtatgatgtgaagaacttatatctattatactatttgcacaaggttccatgaaaatgaattttaccctaaaactagacgcccattgtggcaatgcttcctgaaatggttattacacacgcgcgaatgaatgacttgactcttaaataattacactcaagagcatgaatgcattttaaatgttatagtgcaagactaataaatgcctcaagcactaaaataatccaacatttatatttttctttatatatatatatatgtgtgtgtatatatatatatatatgtatatatatatatatatatatatatatatatatgtatatatatatatatataaaataaatataaatatatatatctatatatcattattgtcatcatgccattataatctaattaagaaaacatttttatgcataatgctttggcaggagtggggggtagtcttttataggataacatatttctatgaatttcagagctgaaatatataatatactaaaacaactctaatattgcttcttgtgttttattgtaacaaattaaattacatcttttatgaaatattaaatttttagtacattttcatttaacaaaaaaaaaaaaaaaaa

SEQ ID NO: 193 - DNA, 7866 bp, Xenopus laevis
gcgctgggaaactcgatcccgcccactccagggaagctctccagtgcgcacgcgcatcgctcagctttccctgcgccccaaacatggccgagcagctgcggcgaagatgctgagattttccgctggaagcgaggaacgagcgcagccatggcgaggctggccgactacttcattgtggtgggatacgaccatgagaagacgggctctgaaggattcggcaaaataatccagaggtttcctatgacagattggagcgacactcccttcccccaaggaatagaactgttttgccaaccaggagggtggcagctttcccgagagcggaaacagccgacgttcttcattgtcgtcttaacggatatcgactccgatcggcactactgcgcctgcctgacattctacgaggccgaaatcaacttacagggaaccaagagggagcacagcgagacggaggaggaggattcgggactgattcagcctgcccaagtgtttgctcctaagagcctggtgttggtgtcgagactagactatcctgaaatcttccgggcgtgcctcggcttgatctacaccgtttatatcgacagtctgaacgtgtccctggagaacttggtgtccaacttggtgacttgcatcgtgccatgtgctggcggctcccagaaactgttttcattgggtgcgggggaccggcagttgatccaaactcctctccatgacagtctccccgtcaccggcaccagcgtggcgctcctcttccaacagttaggcatccaaaatgttctgagtctcttttgtgccgtgctgactgaaaataaagttctgttccactcgtccagtttccagcgtctcggcgatgcctgccgggccctggaggcgctcatctaccccctgaaatacagttatccgtacattccaatcctacccgcccagctgctcgaggtgctcagctcccccactcccttcattatcggggtccattctgtcttctgctcggagattcacgacctgttagacgtcattattgcagatttggacggcggaaccattaaaattcctgaatgcatccatctgtccccgatcccagaacctctgctccaccagacccaagctgctctctctctcgtgctgcaccctgacttggaagttgccgacaatgcgtttgctccattgcgcacccctgtacctcacataaagttgctggataaagaagtgcgagctgtttttctgaggttgtttgcccagatattccagggatacaggtcctgcctccagctcatcaggatccatgcggaacccatcatccactttcacaaggccgccttcttggggcagcggggtctgatcgagaacgatttcctgaccaaagtcctgagcggaatgtcattcgctggcttcgtgtcggagagggggcctccgtaccgaccgtgtgatctcttcgacgagctggtttctttcgaggtcgagcgaataaaagacgacgatcagaacgacacgcacaagattctgaaacacatccgggagctcgccgaacagctcttcaaaaatgagaacccaaaccctcacatggccttccagaaagtccccaaacccacggaaggttcacatctccgagtccatattcttcccttttccaaaatgaatgacctcaaagttcaggagctgatccaggagggacttaataagaaccagaattccatcctttctccccgggcggaaaagaaatgtgtggtgccggctggatcgcccgtagtttcgatagtggacaaggcgagctcggtgtttaacagcgcacggaggctggaagtcgtccgcaactgcatcatgtacatattcgaaaataaaactctggaaactgaaaagaccctgccggctgcgctgcgcgcgctgaaaggaaaagctgccagacagtgtttgacagaagagcttgcgctccatgttcagcagaaccgctccatgctcaaccaccagcagttcgactacatcgtgcggatgatgaactgcgccctacaggattgctccggttctgaggaatacaccatcgcttctcagctgctccccctggcgacggccttctgcaggaaactgtcagcggccgtcagccagtttgcctatacctgtgtccaagaccacggggtgtgggcaaatcagcagttttgggagaccacgttttataatgatgtgcagaaccaagtgcgttccctctatctgaccactaaaaacggcaaccaaggagcatctgagcccaaggaaaatggagttgattctggaaacccggagagaacggttatggacctggcggcggaacagttacgcctgtggccaacgctcagcaaggagacccaacaggagctgatccagagcgaggagagcacggtgttcagccaagccatccattttgccaacctcatggtgtatcttctggtaccactggacaccagcaagaacaaactgctacgcacctctgccaccggcgactgggagagcggcagcaacagcattgtaaccaatagcattgcagggagcgttgccgagagctacgacacggaaagtgggttcgaggattcagagaacgacattgcgaattcggtggtgcgcttcatcacccgcttcattgacaaagtgtgcactgaaagcggcgtaacgcaggaccacatcaagagcctgcactgcatgatccctgggattgtagcgatgcatattgaaaccctggaggctgtacaccgagaaagcagaaggctccctcctattaagaagcctaaaatcatgagaccggctttgcttcccggggaagagtttgtgtgcgaagctttgcgggtgctcctggatcccgatggcagggaagaagcgaccggtggaatgcttggaggacctcacattctgccagcagagggggcgctgttccttaccacttacaggatcatatttaaaggcacgccccatgatgcactagtgggagaacagaccgttattcgcagtgttcccatcgcttcaataacacgagagaagaagataaacgtccagaatcagctgcaccagaacatgcaggaaggactccagatccgatctgccacattccagttaattaaagtggcgtttgatgaagaggtgagcgcagaaatggtggatttgttcaaaaagcagctgatgaagttccgctacccgctctccatcttcagcgccttcgctttcgccgccggccagacggctcctcccataatcttgcccaagcaaaaggaaaagaacacgtccttccgaacgatctccaaaacgattgttaaaggtgccaagcgggctggaaagatgactatcgggcgccagtatgctgctaaaaagaagactggcacaatattggaggagagggggagccgttctggtggcaatgaggatgatgacatatcagtttcagatgataacgagctgccgagcggaacattaaaaccctcagaaaagtccacgatggagcagctggtggaaagggcctgcttccgagactatcagcgcctggccctgggaaccattagcaacagctccacccgcttcaagtcggagcatttccgggtcactgctctcaacaggatgcactcgctatgcagaagttacccgggactcttggttgtccctcagtctgtgcaggacagcagcttgcagaaagtcgctcgatgttaccgacataaccgacttcccgtcgtctcctggaaaaacgccaaaaccaacgccgtgctcctccgcggcggaggctttcatggaaagacggtggttgggctctttaaatcccaaaacactcatacagctgcgccagcctcttctttagagtcttccagcagtatcgagcaggagaagtatctacaggccttactcaacgctatctctgtccactacaagatgaatgggaacagtaccctcactgttagaccaacgcttgctctgtctccaggcagtgaccgaaagtcttcaagaatgtccagtgtggttaaacacgttgtccctagtcacgtggatggcagtctgtcccatagctttgcacgcggaggagtatgggcgagcctacgctcaagcaatcgcttaatcaccacccagacgccgcttattgacgttggagcgcggctcgtgggtaaggacctccaaactacctacaccgaccattccgccctgcaaagccaactactgaagcgccaagctgccctctacatattcggcgagaaatcacagttacggggattcaagtttgactttgctctgaactgtgaatttgtcccggtggagttcggggacatacggcaagtgaagactagttttaaaaagctgatgcgagcctgtgtccccagcagcaaccctacggattccgaatcaacattcctgaaggccatgggagaatcggaatggttcttgcagattcacaggatcatccagctgtccgtcatcatatcagagctaatggaaagtggctcctctgtgatgatttgcttagaggacggatgggatatcactacccaggttgtctctctggtgcaaatcctgggagatcctttctacaggactcttgaaggtttccgcatgttgattgagaaggaatggttgtcgtttggccataaattcagccagcggagtaatctatcacccagcagccaaggaaccggatttgtaccaatttttctgcagtttttggattgtgtccatcagatacataatcagtacccaacagagtttgagttcaatcgatactatctgaagttcctagcataccatcacgtctccaaccgcttcaagacctttctgctggactccgactacgagagattggagcatggaacattgtttgaagacaaaggtgataaacactcacggagaggcatttgtatctgggagtacatcgagaggatacacaagaaaaaaacagttttcttcaattatttgtttgctccaactgaattagaggcgctgaagccaagtgccaacatctcaaccctgagaaaatgggaatactacatggaggagaccttggcgtcagggccttcctatgactggatcataaccccttccagattcaacgcttcagatgagacagactcaggagaagaggcccagcagcaagggaagaggaaaattgtttggccatgctatgacgatgtccaaaaagtacagcctgatgccatcactcaccttatgaatgagatcgagaggttggaaatcaagttaaaccagacctcggagaggtggcagcttctttgggagagggcaaaagtcaagctcaaggagaacgccaagaaagagaacaacaatccagcaagcctcgtctcagccaatttacagtcctatcagaagaggtcgatggtgcatcttcccgacagcgggctgggagacgaacagaacctcaacgcgtctccttccaatggagtcgacagaagaactgcaacactgtacaatcactttacctcaaagaacgaggagaacaggtcgtatgaaggcatactctacaaaagaggagctttgctaaagggctggaagcctcgttggtttgtacttgatataacgaagcatcagctgagatactatgattcaggggaagatacaagctgtaaggggtatattgatctggctgatgttgaaacagtcgtccctgcagcccctactataggagccccaaaacatgccaatgagaaagctttctttgatgtaaaaaccagtaagcgggtatataacttctgtgctcaggatgctcaaagtgcccagctgtggatggacaagatacagaactgcatatctgatgcctaaaaaacaaggaaaagtccaagagaaaagattgtgctcatcatcgcctttgtgagcttaataccccatgaattacagtgttatatggttgtacccacctgaaggaatggggtatgaaggaatcagccgagccgagctaaacaattgtctgtttcacagaggcagcacagggaagcttcatatattgagtattattgatgtaaaagcacacggtggcagaatctggaaccctcccgttttattgccaagagagatgcagctcaatggacctgtggccagtttggctttattgggttatgactccttcaaggtcatttcaggaaggataaatatatacgtcttaaatagtttgtgtttacataacaaattgaatttcccccccccccctctggatatctgaatgaattactgcaggtagcctgggtctagcgtaagtgcagtgcgttaaaatggttttgacttgcttagaactgggagattgcaatggtggaactgcctctcttcaaactaaggatgtgccaagtgctcagcttaatggatggtggagaagttgggcatctgttccattgcagctgcttctcatctcaaagtgtggtggagaatgcagatagctggcatttggttgagaatgaggacaggcggtatttggtgtagaatgaggaccgctggcagttggtggagaatgcggacagccagcagttggtggagaatgtggacagccagcagttggtggagaatgtggacagccagcagttggtggagaatgcggactgccagcagttggtggagaatgaggacagccagcagttggtggagaatgcggactgccagcagttggtggagaatgcggacagccagcagttggtggagaatgcagactgccagcagttggtggagaatgcggacagccagcatttggtgaagaatgaggacaaccagcagttggtggagaatgcggacagccagcagttggtggagaatgcggacagccagcatttggtggagaatgcggactgccagcagttggtggagaatgcggacagccagcatttggtggagtatgaggacatccagttcagccgacctctcagctttccgtatggtggagtaatgtggacgtccattccagtgcaactgccctttctaggcaaccattgcacgtgcttcctcctcagtgtaaataacgtataactgcactaccccttatagcaagcacttgcacttattccgatgaacgtcacccagaaggtaaaatatggcgtccgacacgtgaccatgttcaggaatttgcaaaaaaataaatccactatgtgcatagtctgtttccaatgtgaagtgatttgataactttaaaaaaaggaagaaaaaaaagcaccgtacatatttcattctttttcattttcttattcaaaaaagcactggggatgctcacgtcctccaaaaaacagatggcgtccataatcccccccaaaaaagggcgtgtctttgccacaaccacttctgatattcttgactggagtatttagctagcgctttggattttcaatacggttaccttatatttcaaggtttgtactgtatataaataattttgtattttcggatgtttcggattaaacttaatttaatataaacgtgatcaggagttaaattaaccaaactgaccttgttacatattatcacttttccttaaagccactggttttttttggggttttttttgttctccaaaaagtgccgaaaacttgaaataattttccctattggaccaagagttttggggtttttttgtatttttattttaaaatgtcctccaccgtgaaattttgtaacccattaaaaaacaggcccccttttttttgcacatttgtatttttctttgtatatgaagtacctttttatgtactttgtaatatacagatcccatggcttattagttcacccatggggggaaaatccgcaatggtttcttttttaactcgttttaacagttttatgtatttgttaatgatgtgtctgctaaccatcttgtaataaatctaccactgagagaagtgctgtaaataaatatacagtctacatggaaaaaaaaaaaaaaaa

SEQ ID NO: 194 - DNA, 2496 bp, Xenopus laevis
ctattggtgtttggatcatccacgtttctttgttgccctttaccactcttgtcgttgcacattgggtgtatcatgggccgcaaaaatcgtcgcaatcgccaaagacgtactgagcaacgaagtcctgcggaggaagagcggcgcaaagctagagaacaggcggcttgggaaggtggttaccccgaaatcatcaaagaaaacaaattatttgaacattattatcaggaactgaagattgtgcctgatggggagtgggacaagttcatggatgctctccgggaaccccttccagctactatacgaatcacaggatacaaaagccatgctaaagaaatactgcattgtctgaaggagaaatactttaaagaattgccagatattgaggttgatggacagaagatagaagcccctcagccattgagttggtaccctgaagagcttgcttggcatactaacctgagcaggaaaataataagaaagtctccagaactggaaaagtttcatcaatttcttgtcagcgaaacagaatcgggcaacattagtcgccaagaggctgttagtatgattccaccagtccttctgaatgttcagccacatcacaagattctggatatgtgtgctgctcccggatcaaaaacagcccaaataattgaaatgttgcatgcagatatgaatgtaccctttcctgaaggttttgtcattgctaacgatgttgacaataagcgctgttacttacttgttcatcaagccaagcgactaaatagtccatgcattatggtagtaaaccatgatgcctccagcattcctagactactcatagagaacaatggttccagagaggttttgtactatgaccgaatactttgtgatgtaccgtgcagtggtgatgggactatgaggaaaaacattgacgtgtggaagaagtggacaaccttaaacagcttgcagttgcatgggctccagattaggattgctactcgtggggttgaacagttggcagaagggggtcgaatggtttattctacatgctctttgaatcctgttgaagatgaggctgttatagtttctttgttggacaaaagtgaaggttccctggagcttgctgatgtggcttcagaacttcctggcttaaaatggatgcctgggattacccagtggagggtaatgacaaaagaagggcagtggtttgaaaaatgggaggatgttcccacaagcagacatactcagattcgcccaacaatgtttcctttaaaagatgaagagaaattgaaatcaatgaatctaaaccgttgcatgaggatactaccacatcatcaaaacactggtggattctttgtagctgtgttgataaagaaggcacctatgccatggaacaaacgacagccaaagctgcaaaggaggcctcctgtttcagtctgtgatgcatctgttgctcctgagattgtgaaagctgtcgctgatatttcagcaattgcagatgaacctgctgtagatgcagagaatggcgaaactaaaccttgtacaaaccagagtggttctagtaaaactgatagtgtttgctgcccacctccttccaaaaaaatgaagttgtttggttttaaagaagatccctttgtctttctttctgaggacgatccgatttttgaaccaatccagaaattctatgcacttgatccttcattcccaaaaaagaacttactgacacgaacacaagaggggaaaaaaaggcagttgtatatggtctctaaggagctgagaaatgtacttctccataacagtgagaagatgaaggtaataaacactggtattaaggtgctatgccggaacaatgatggggaacagtatggctgtgcttacagattagcacaagagggcatatattctctatatccattcatcaatgcaagaatcctaactgtatctgttgaagatatcaaagttctgctcactcaagaaaatccatttcttagtaaatttagtaaagaaacacaaaaacaagctaataatcttgatatgggaagcattgtgcttaaatatgaacctgatccacagcaaccagagactttgcagtgccccattgttctttgtggctggcgtgggaaaacatcaattcgttcttttgttttttttttacacagaataaatttagtacagtggatttttatttaatcagagaaaagtgatttgttatttaaaggggaagtatggcatgagagtcttacttgcccttttaaagtagacatcacctctctaagtttaacactgagtaagcctttatgatcttgcgctctcgctctctacagctatatatatatatcattttttttattatatgggctagtttgtggcatccattgttcaggatgcaacattattgtaattccggactttataactcttggtttcatttccattttgcgaaatcacctgaaaatatactgcaaattttattttaaaataaagataaagatgcattgcttaaaaaaaaaaaaaaaa

SEQ ID NO: 195 - DNA, 2737 bp, Xenopus laevis
aaaaaaaggaataataatcacccgacgagggagcgggaggacagagtagagcccggacacaggtgtgtggcagcggcaccggaggaggaggagagtgccaagcggtgtcggagtgaagctcctcctgacaaggagcgggcggagcagctggggatttgatagtgtgcgctatgaataattctttggagaacaccatttcatttgaagaatatgtccgcatgaaggcccgtgcagttccacagcacaggatgaaggagttcctggactctttggcctcaaagggacccgaagccttacaagaatatcagcagccaccacccaccaccaccatggtctatcaacaaggggctaattgcatctatacagacagcacggaggtggcaggatccttacttgaactggcttgtcccgttactacaagtgtgcagcaacagcaggaacagcagatacaagttcaagcgcaacaggtgcagattcatgaagcattcaccaggccttggaatcttctctaccctgccccacagctgaatcgaatgaacctctcccccgaggggtcccaggattctggtatttcagaagacatgttggtgcaggtacagcagtcaccacagcaggtaacaggccaacagctgtcgcctcaactaagtgttcatccatcaaatgagcagtcaattcaagtacaagtacagatccagggctcaggacagtcgcagacacagcaatcaatgcaaaatcagtccctgcatacccagagctcttctcagatgcaagtggctcagatccaggttcaacatgttcagccccctgatatgcaggatgatcacatgcagcagcagcagatccaagcacagctggtggcaggacagtctgtgagcagcggtatccagatacaaacactttcccctccacctactcagcaaggctccccacgggaaggggagcgccgatccagctcttcgagtgtccttcagcctgtaaagaaacgcaaagtggacatgccaatcactttgtcatatgcaatctcaggacagcctgttgccgctgttttggcaattccacaggggcagcaacagagttatgtgtctctgaggccagacttactaaccgtagacagtgctcatctctatggggccactgggaccattacaagcccaacaggagagacgtggaccatcccagtctactctgctaatgcccgcagtgatctacaacaacaaaacataacccacatagccatccctccagaggcctacaatgccgtccatgttacaggttcccccactactgtggcggctgtaaaattagaagaagagaaggacaaaatggtcaaaaatacacatgaagaagtggtgcagactcttgcaaattctctctttcctgctcagttcatgaatgggaatatccacattccagtggctgtacaggccgtggcaggggcataccagaatacagcacagactgtacatatctgggaccctcaacagcaagtaacgctacacgagcaggttcagcagcagcagcagcaacaacaacaacatcagctgcaggcacaagctgttaatgaggtagaaccacaaccgcaaccttctcctgaacttatgcttcccaataccttgaaacctgaggaagggcttcaagtctggaagaactgggcacagaccaagaatgcggagcttgaaaaggaatcccaaaacagattagcacccataggaagacgtcagctactaaggtttcaagaagacctaatatcctcggcagttgcggagttaaattatgggctgtgtctaatgtctaaagaggctcgcaacatggaaggtgaaccatatgatgctgatgttctctactatatttttctgtgtatacagaagtacctttgtgagaatggaagagtagatgacatattctctgacaattactacatcaagtttgcagagtggcttcatgaggttcttaaaaattatcagcccagagtcactcatattgggtatgtgatccccagccatgtgacagaggagatgctttgggagtgtaagcagctgggagcacactctcctgccacactacttacaacacttatgttttttaacaccaaatattttctgttaaaaactgttgaccagcacatcaaattggcattctccaaagtgctgaggcaaacgaagaaaaatccttccaatccaaaggataagagcacgagcatccggtacctgaaagcacttgggatccatcaagcaggacagcaaaaaggcttctcaataacagacgacatgtacgcggagcaaacagagaacccagaaaatccattacgatgtcccattaaattgtatgacttctacctcttcaaatgcccacagagtgtaaaaggtcgaaatgacacattctatttgacgccagaaccagtagtagcccccaacagtccaatctggtattctacacagccaatcagcagagagcaaatggaacagatgctaacccgaattctgctcatccgagagatccaggaagccattgtggttgccagtgccagcaacatgcactaaatcattctctctgggtccagaagagacgaaaaagaagcctgtacagacttttacactaaaataagatgcctactttttctgttatttttattttattttttattggtgtagtaacggagcccttttaggcttctcctgtttaaaataaagtgtaagtaaaagcacccaaatgtgaaaaaaaaaaaaaaaaaaaaaaa

SEQ ID NO: 196 - DNA, 2760 bp, Xenopus laevis
agaaaggcgagaccggacaaattagagcgcagcgcagcggccttcaccgtttacgcctattttgagcccggtttcgcccactaaagcttcgtgtggggccaagttcccacttaaactttaccttgtcgctgggccaggaaaatgaagatgattgtggatttcgaggagtgcctcaaggattctccccgcttcagggcatctttagaagatgttgaaggtgatgtgtccgagttagaaattaagcttgataagcttgtgaaactttgcattggaatgattgatgctggaaaagctttctgtgctgccaataagcagtttatgaatggtattcgggaccttgcacagtattctagcaaagactctgtgattgaaagcagcttgacaaagtttgcagacagtttacaagagatgatccagtaccatgcaatgctatttgaccaagcccaacgatcaatcaaaacacagcttcaaacatttgttaaagaggatcttaaaaaattcaaagattccaaaaagcaatttgataaggtcagtgaagaaaaagaaactgctttggtgaaaaatgcacaagctcaaagacccaaacaacatgaggtggaagaagcaaccaacattttagtagccacacggaaatgcttccgacacattgctctggattatgtcctacagattaatgtactccaatcaaaacgaaggtctgaaattttaaagtctatgttatccttcatgtatgcccacctgaccttcttccatcagggctatgatcttttcagtgagctggagccatatatgaaggatctgggtgtacagttagataatcttgttggtgatgctgcaaaggagaaaagagttatggaaattaaacactcaacaattcagcaaaaggattttgctgatgatgaccccaaacttgattgtaatgttgatacaaccagtggcattgttatggaaggatacctctttaaacgagccagcaatgccttcaaaacgtggaacaggaaaaagccagaccacaccaggtatcaaccagcctccttgtaacctccaatgacttcttgtggcacgtgctcttctccatattaacccattaattttgattacttgcaatggacatatctcgtatcggctactgcaggggatggtagaagcttgattactttacagagtacattaagtcccccaattttccctaaatctagaaacatacaagtgaaatagttttgctaacattctgaagaaactacagtttcaggtgttgttaatctttcagtttatggcacacttagcaatttgttgtgcttgtcacagcactaattgcttttattaatgtcaaagcatatcccacgataatgatcgcttggacagcttccacaatggtcccactttaaaggggaactatcctgaagatgaaagtgtggtctatgcttcagcacactgaggtgggagggtttctggatatagtcaattggaagttctgtaccgtttctgaagtaatggagtctgtatttactattcctctttcggcatctgtttctcttcattctctcttcatgcaggggttgggtgtcagatactgattgatggttatggacaatatatctataggggggcttcctttcctggcaggtgggttggggctcactcaaatcgccggacttcatgtctctctgcatgcaggatttgtgcaaaaggcagttactttgttagattgtctttgtagtagaatcagttatttgggtgagctctggttcgtttgttgggaacggaagccccccctataagatacattctatcgttcgaatgccactaaccgcacaataatttgacggattggtcggactgcactgaaatcggtcgttcaccaaagaagaagaatcgtcgcgtctatggggaccttagctgtcggtgaatgtctgacacccatctgcagcatggggacggggtggggagaaacagatgctgaagggggattgtgaaggtggacttgattgtttcatagacggtgcagaatttctggttgattgtatttggagagtttcttacttcagtgtgatgaagcttatattaaaatttcattttcacgatagctccactataaaaactaaattgctacatgtgccataaatatcattgcctttttttaggcaaggtctctaaaaaaggatacaaagtgcagatggactatcttatgcatgatttgctaaatatttcaagtcaagaatggcacactagcttctcaaaatgctgtaaactgcaacacatcttacgaagaagtatggggaattgttgcatccaacagctggagggtaatcagtttggcattcctgtttttaactgaataggtactaatactatcacctctctgtaccaaaagcattgatatatatgtgtatatgtgtatatatatgtatatgtatatatatatatatatatatatatatatatatatgtatataaaagacttattgattgcactgttaatggtaacctgtacacattcaagtaagggaaaactggaaagcacatttgctgtatctccagagattttttccattgcatgtttttctaccttttgattccgctctttatttgcttgctgtgactgtttgtttaacagctccttatattgtattgggggggaaaatcgaccttgtcgcttaaacactccttccttagctgtagtatttttcttaccaatcattagcactttattgtccatttctaataaacaattcttctcttgtcaaaaaaaaaaaaaaa

SEQ ID NO: 197 - DNA, 1137 bp, Xenopus laevis
ggaaatcccagcgtggaggccgctggcgggaggggatgcgggaggctggtgactgggaatcaacatggggaatctcttcgctcgaaaaagacgtagtcgggttaccgagcaagacaaagctgtcctgcaactaaagcaacaaagagacaagctgaagcagtaccaaaagaagatcacattacagctgcaacgtgagcgggagttggccaagcagttactacatgatggcaaaaaagagaaagccaaattattgctaaagaagaaaagataccaggaacagcttctggagaaaacggataaccagatcagcaacctggaaaaaatggttgatgacatagagtttgcccaaattgaaatgaaagtgattgaaggattgaaagtgggaaatgagtggctgaagaaaatgcatgaggttatgtctattgaggaagtagagaagatcatggaagagacgcaagagggcattgaatatcagaggcaaattgatgagatgctttcaggaagcctgactgctgaggatgaagaggcaattctagaagaactagaagctattactcaggaagatctggagcttcccgaggccccttcagagcctctttcagacactgtaccagagaaacaagccgtcaagaacaggccaaaaccacagctggttgctgcgtcttaactgtgtgtcctgtgacatgtgacaaatgaacctcaagtattcaggatgaaagtatcaagcagaaacatactgagcataacaactttaacttccctacagtgcgaggcataaaggctaagcccgaaggctgtgcaactgtatcttgaatagtctacagaagttactccaaatcttgggcgtctgaactatatttttttttctgggacctctaataatgttctcctgcagcagaggattctctgggttttatgatgaattagaaaccaattttctagcataattaaaaatagttgagggatttttgtttgacttttttttttttaatccaactggtatttacaactttgatttttttctcagtaccagtgttttaaaaggactgttctccttagaaaaagaagataaacgtatgaaataaacattaagggacagactagaaaaaaaaaaaaaaaaaaaaaaaaaaaaaaaaa

SEQ ID NO: 198 - DNA, 3568 bp, Xenopus laevis
gtcggctcagtgaggcgagtttagtgatcctaataaagagtcgccctatgaagctgctcatgagatgagagtgtggacatgttgtgtggagaatgctgcgcctgtgggttaagcgtgtgcaggctgtcgttatccagcagcttatccccgccaggggctacctcctcaccacttgtcttaggaaacaagccgaccttaaacttgctcggagcccaaggaaatctatccatgtgccgggggagcccatccgcaggcactttaagaagggtctcctcacagccttggatcatggcttcctgcagccggtaactatgacagaaatccgccagtaccttcgttccaagaatgtgtccttccacgatggttacagctgcctgcacgtccccagccccttcacccccgagcaggacacatgcttgtttattgacaagaccaccgggcgcttcctgtgcaaggccactctgctggagggcagctgggaagacttccaggacagcatggagctgctgcacaaagaaggctgctcccacctgagcccagagatcctggctgggtacctggtggacagcgactcggactctgcggaggatcagctgaaggacagcgaggtgcgcaggatctgggacagggccgtgtggttctctgacttgggggaagaagagtcccaccaaatcaaggccatgttcaacattacaaagattgccaacaatacccttaagaagtttggggtgaagtgtttccagcctacaaaaagcctggtgttcccgtggtataaccccagggattccagcctgaatggcctaaagttactgtctgcagaatgcaacaagcagaaggtccattacgttgaaacaacctaccccaggcctgcccgttactacaacctctttggactctgtgtctcgggaaagaaggagactgaggtggtgatcactagccgtgaagtagactgtttagccattcaccaatccactggagtcaccaccatagcattgcccaggggagcctcttgcctcccccctgtcctcttgccctatctggagcaatttaagcgcattgttctgtggctaggggacgacctgcgctcctgggaagcctccaaattatttgctaggaaattaaacatgaagagatgttccctgatccgccccggggacaagcagcctagtcctctgcacgcctttaatgatggcttgaatatcggtaaaatccttaaggcctctctccctgccagccacaaatctatcatctctttccgccaactccgagaggaggtatttgggcaactggagaatgcggatcaggttgcaggagtaaaatggaatcggttccccgaactaaataaacttcttaagggacaccgcagaggggaactcactgtatttacaggcccaactggtagtggaaaaacaacgttcatcagcgagtatgctctggatctgtgcatccaagggattaacaccttgtggggaagttttgaactgaacaatgtgcgtctggccaagatcatgctgacccagtttgctctgcagcgcttagaggagcagctggacaaatacgacgagtgggcagacaaatttgaggacttgcccctttgcttcatgactttccacggacagcaaaatatcaaagccgtcatggacaccatgcagcatgccgtttacatgtacgatattacccatgtgatcatcgataacttgcagttcatgatgggacaagaaaacatctactctgacagatttgcagctcaggactacatggttggggcgttcaggaaatttgctacagttaataattgccatgtaaccgtagtcattcacccccggaaagaagacgatgacaaggaactgcaaacctcatcgatttttggctctgcaaaagcaagtcaagaagccgacaatgttctcatcctccaggacagaaagctggtaactggccaaggcaagagacacctgcaagtggcaaagaacagatttgatggggaagtaggtgtattctcactggaattcaacaagccctgtctttcctttgcttcctccaagggcaagcagaaattcaagaaactcaataaagacgctgagacaccaaattccaaatcatccgaggaaacaccagcaaagaataagaaataaaatgacgtattttgtatatcttcatgttcttattgcacttactttgaagttcaatggttttagagttttattcttcagactttcatcccagcactttccaagcatgtcctgctgtgctcccgcatttcaattgaccttccgctggctgcagagcagagccagacacggagtctcttggcatttggggaagaacatagtactataatgtgagagtattataaagcaacattactccataggggaataataaaaggaacagacacacttagcttgcaaaatacttaccttcaaatgtggcaaatcatttttgagttgatgagctgaactgtaggtgatcttgatcttcattagaaggaatgggaaagtgttagtggtgttcagtgtacagcatattcttcataatatatatacatcctaggatatgataccatgcaatgtttcagtaggaatatcacactaatacctctcatgctcttgctatttagctggaagcctcagtctccaatctggaaatgcagattttgcactcctccactaaactcttgtgggttgtggcatgagctgggtttatagcacaaatttgcccaccaatggaattttatgacatacattaactgacagtgtgcacctagtgctgtttttctgtggtggttcttactaagtaagtaaaaacagtgactttcctgctaaaaaaagcaattttcttgatggaagttatgccgcttctattattttcaaataaaaaaacggaggtgagggaaaaagggaacccaaatagtaaaagcggcagccgcagcacccaaatcaaacatcatatggttacatgttgataaccccccccacacacacacacacacgcacactggcctcaactggggatataacagcatttatttatatactgagctatacgcctccatatttttcccaatggtttgaattctggcattccatccttctgctgctaaacaagtctactagtccaccaatgaaaaataggatatttattcctgatttgtgaagtctgtacaaaaccccagactgaaaaccaatagatgcaattgtgacctcataacaaaacacaaataattcaatgatctttattacaaagtgaggcctttatatgcggtcaataacgttcttgtattacttccccctagactagggatctccagtccagagttgttgctgatccttgcactgtaggatgttgggagttgtagtacagtagcaggagggccaccaattgaacattctgaagtgctgagcagggtctcgcaagctgtagtgttcagtatgcaggttgctggacaatacaaaccatgtgaagcaccaactttatttattctaactagtgtgttttatatcctatttatatttcaactgtaattgtttgtgtattaaaaacaaaacatttgtttaaaaaaaaaaaaaaa

SEQ ID NO: 199 - DNA, 3037 bp, Xenopus laevis
cgccgctggatgtaggagggttccttgttgtcgttggtggatcaagctgctccgggaggtctgtgcgtagagaatctcgctgcaccttcgcgtctctgctgatcagaaaggaaagtttcctatacacatcaatgaaggaaagaagaacgagtcagaaactggccagcaaatcaatgatggatcccaaccagaatgtgaaatgtaaaattgtggtggtgggggacagccagtgtggcaaaactgctctgctccatgtctttgccaaggactccttcccagagaactatgtccccactgtatttgagaattacacggccagttttgaaattgacacgcagaggatagaactgagtctctgggatacatctgggtccccttattatgacaacgtccgacctcttagctacccagactctgatgccgtcttgatatgtttcgatatcagtcgccccgaaacactcgacagtgtcctgaaaaagtggaaaggtgaaattcaggaattctgccccaacaccaaaatgttactggttggctgcaaatctgacctccgtacagatctaaccacattagtagaactatctaaccacagacagacgccagtctcctatgatcagggggcaaacatggccaagcagataggagcagccacatacatcgaatgctctgcgttacagtcggagaacagcgtcagagacatttttcatgtagccaccctggcatgtgtgaacaagactaacaaaaatcttaaaaggaataaaactcagagagccacaaagagaatttcgcacatgccgagccggccagaactaagctctgtggccacagacttgaggaaggataaagcaaagagctgcagcatcatgtgaaaccatttttttgttttttcatactgaccgagaaatatccagtcatcagtgcagtctgaatgaagggagctgccatttagttctgcattctgctggtggtcaagggaaaccccttgtgtttggtacttttaggattcagcatgttgaccgaggaaggaaaccgtttagctgtttctgaaatgttacatggaaaatatgccaaaaaaaacaaaaaggaagaggaatgtataggagaaaagggagagtaatcatatcgaaacaaccaaacctttcagctggatttccctgtgctgtccaatcaccagccaatattctagcgcacgttatcttcgtatgaggatactaatgaaactgcactttgggatggcgtcatttggcttcaagtgtatattgaaactttgcatagcttactatctactctaacagaattaaagagagctggggaacccctatcattgcatgaaggctagggctccaatcaaaagggggaaaaataagtcattcagggatgtccatattgccttcagctgtcggtggcagctaacgacagcccgcggttgggcacccctgatgtaaatacaaagttgttaaacaacattaaatatgtcctttgtgttcttatcaacctttatttttacaaaggtgacccgtggatgctggacgaccagagcaaattctgtaccctatactggccccggtgatgcagaaaagtgattgaatgtataggaaaactcccacaatgctctgcaactcttacaattcatttccagcataaactgtgtgtaaggaagccggcctctggcttaaccctttcctgttttcacagaatatggtacttttttttcttagggttttgatttttttattttaaaagatattaggttaaactccatagaccatgcaaggttgtttccaagtttcataaagtgtaggtgctagataggactagtgatcatccaacattagagccagtgacatgcagtattgacgatcccagagagcactgagtgggacctttggatagaaacacataggaaatacttcattgttttctctgagaacgacagtgtaaattacattagtgcttattgagggttgacatggcatgccttgtgaataacctccccatcctttgtgattatagggtcagtatagacttcagatatgcagaggactacccctgttggcattgtcttatggtattatgggcatcaatggccgatttcacctggtctttccctcacagttatgccaaatcatgcaaaggagttctaggggaaaaaaggaaagcggtggccacccattttgagacaatggcagcttaaggctgactatgcacatgcaccttcatagactggggtggctgagggaaaagcaaaaggacaatgattacaaaaaattaaggtataagcccccctaatggtaacaatatcctgatgactatgccttaaccaactcatagcagtaatcgcatttattatgcaagggactctattagactaatcctcccacgtgagttgcatgtcattcccctaaacctgttgtttacaattagcaactgtgctagagtgttttcaggaacgtatttttttctgtgtgtgttttaacccattctaggccaaataaactccttttgtagtgggccacccggatctcaccagcacctgatgggttgaaaggattttggctattacatatcttgctaagtggcttgcttggggcaagcattctgtccagcaaatgcttcatttttgaagctctaatctttttttttttctcccccgtattcaaattttggggaaattgggcgatattgagtcaacacaacctgttttctgtatcatgagcattttgtcctatgtccgaaagaagtcctgttacgccaatacagatatataccactgcaatatgctttcccataatgcaactatgtgctttcagcagattctgaccaatagctgctgtgctctattttttattttgtatacttatattgtaacaacggaataagttatatctgtcttaaagctgaacatcattactttttttttgtcagtcactttgtatgtatgttttttgtaaatgtccctgctgtatttattaaactttttttttctttaataaaagcttaattaaggttaaaaaaaaaaaaaaaaaaaaaaaaaaaaaaa

SEQ ID NO: 200 - DNA, 3394 bp, Xenopus laevis
cggcgtctgctatcggctcttctgctcaatccagtccgcccggagagatgatacattggccgctccaactgcagccgccgccgcctccctccgactgatccccgatctctagcctgccaaaatgattcctgttgccgagttcaagcaattcacggagcagcagccggcctttaaagtcctcaagccctggtgggatgtcctggctgaatatatcacctatgccatgctcatgattggggtctttggatgcaccttgcaggttactcaagacaagataatttgcctccccaaccacacctctgccgatgttgtttcccaaattacatgccaggagttcacccaacagtcttcagcttccaatgatagcgaccttgaaacaactgttccacccccgactgctacttccagtcccccccgggagatgagtggtctacgcaacaacttagacctccaacaatacagcttcatcaatcagatgtgttatgagacggccttgcactggtatgcaaaatattttccatatttagtggtcattcacaccttgatctttatcatctgtggaaacttctggttcaagttcccgggcaccagctccaaaatagagcatttcatttccatactcggcaagtgctttgactccccttggactacacgagccctgtcggaagtctcaggagagtctagtcaggagaaacccaatcaggagaggagcatcgatcgagaactctccaagccaaactttgaggagggaagccctgctaccgctgacctacccattccagataaactggtggctgagacttcttcagctagtgcattggacaagaaggagggggaacaagccaaagccctgtttgagaaagttaagaaatttcggcatcatgtggaagagggtgacttactctactcaatgtatatgcgtcagactgtgctaaaagtgtgtaaatttgtgctgatcacaatctacaatgcagtcttggtgggaaagattcacttcattgtgccctgcagtgttcatacagaggacatgactggctacaatagtttctgctgtaaccacactaaggcccatctcttttccaaattagcaataagctacttgtgttttttgggtgtctatggcctcacttgcttctacactctgtactggctcttcagacgtcctctaaaggagtattccttccggtcagtgagagaagagactggaataggggatattcccgatgtgaagaatgactttgcctttgtgctacatctggttgatcagtatgattctctctactccaagaggtttgccgtcttcctctcagaggtgagtgaaagcaggctgaggcaactgaatcttaaccatgagtggccagcagacaaactgagacaaaaactccagcatacacccgaaggtcgactggagctgcacctcttcaaactcccaggcttgccagatacagtgtttgaggttgcagagatggagtcacttaagttggagatggttaatgaggctctcattccacccttggtatctaagctggtgaggctggaggagctgtcccttttaaattgcacagccaaagtgcagcatgcctccatggcttatcttcgggaccaccttcggatactgcaggtaaagtttgacgacattaaggagatacctttgtggattttcggtcttcgggctttggaggagctccatctgtttggctggctgtcacaggacttgtctaagaacccagctttggaaagtctgagggaattgaagagtctaaaggtgctgacaataaagagcaacctctctaaaataccagctactgttgcagatgtggccggccacttgcaaaaatttagcattcacaacgacggaactaaactcctgacccttaatgctctgaagaggcttgttcttgtcaaagaacttgaacttgttcgctgtgaactggaacgtattccccatgcagtttttagcctcactaacttacaggtgttggacttaaaggaaaacactctacacacgatagaggagatcattagcttacaacactgccgaaagcttagcgttcttcgattgtggcacaaccagattgcctacatccccgatcatatccgtaaactgaagggtcttgaagaactgtccttgaatcgcaacaaaattctggttattccctcccagttattcctctgtaacaagctcaggcatcttgacctgtcattcaatgaaatccgggaacttcctccagagatcggggtgttgcaactactccaataccttggtttaagtggaaactttttggaggatctcccgactgagttgtttttctgtcaaaagctaaaaactctgaaactggggcaaaacagactggcaagtctgtctcccaaggtggggtctctagtttgcctagtaaaactagaactaaaaggaaaccgaatggatatgttacctcctgagatagggaactgtttgagcctaaagagatcgggcttgaatgttgaatcgttactgtttgacacattgccagtagatgtgagggacaaatttaaagaggactgaaatgggtgagtggtgaaaggccgggcagaaatatggaggttctccatgatcaataagagggaagggtgtataagctgataagtaagcagaggtaatcagttccctgagatattacagaagggtgtaagagaatagaggaagaagtaattatgtcttcctttccttctaaatcttacatttatggacaccaacctaataggtagtgcataatgtatttcttcttcagtgacaccacgggacatatttaataaagatttgtcatggatttgatggtgtacaccacagtgtcctgtgtaaaaatcacagttttatagagctacttaattatgtgtgtagacgagtgtattaatgatgttggaaaatgttacgccattgtggtgtgaatttattccatggctttaaggggccgcaagagtggtgcaagttattggaataaattggcttaacaaataaaatacgccaaagcacagcattaatatgtaaggtcgatgatggagctctataaatatgccatatattgtgcacaaacctatcggggtcaaccatgttctacaacttgctcctgtggttgatcagagacctgtgggaactccctataaagaggaatgattatattgtagaattttttaataccttcccaatatatgaagtagtatacatctaggatggacatgaactagtgggagactgatgcctctagtaatggtaccagcaatagctgcaatagtctcctaaagatgtctgcccactacaggaaaacctgcccgccccggaggacaaatccttgatgtacattttgtttttatttaatgtaacaataaacatttcagttaaaggaaaaaaaaaaaaaaa

SEQ ID NO: 201 - DNA, 970 bp, Xenopus laevis
atgtcgtgtggagggcagggtcgtgttttcacgcgcgtaaattgtgagacgagcaaggaagatatccgggttttgacatggcgggtctgcgaggtgctttaattgttctagagggtgcagatagagccgggaaaagcacccaggcacgacggctggtggaagcactgaaagagcggggttacaggaccgagggcctgaggtttccagagagaacaactgaaattgggcaactgattggctcctatttagagaagaagagtaacctggaggaccataccattcatctgctgttttctgccaatcgctgggaacaagttccaatgataaaagagaaattgagaagtggtattacactggttgtagacagatatgccttttccggggttgcgtttacaagttctaaggagaactttgatctgcattggtgtaagcaacctgacgttggacttccaaagccagatctggtcctttttctaaaagtgagccctgaggttgcagctacacgtggaggctttggaaatgagatatacgaaaccaattcattccaagaaaaagtagcaaagcgttacgctcagcttatggacgataaaacggtcaactggaagctcgttgatgcctcccaagatatcgaaaatgttcaccgacagttaaaggagctaagtgaaaaggccatagatgatgccaaagatcaaccgattggcaagctatgggaataagaatctccttgataactgaatgtctatttaaacagtacctgtgcaaagtatttatcacagtataaagtagtataaaatatgttaaaatatcactttaccttctgtatttctgtaacaaattgcttctgcaaagtgagcaattgcacagttaaaataagtaatgaactactttttattctggcgattcatagcccaatgtgattgaaaatataaataaaaatattatattgaaaaaaaaaaaaaaaaaaaaaaaa

SEQ ID NO: 202 - DNA, 2179 bp, Xenopus laevis
gtcggaggaggggagaataataatagtaggaggaggaggagggagatcctggtgctcggctgacgttgcatgggatacaccatcacagcctccccccatccacaggccctgggatcggtgctcgaaaggcagccattgaatcagtcgcgtttgctgcatcccaggtgtctgccagatcctcagacatggacggccacaattaccattactcacgggagttttatgaccaatatgcacaaagccaagacaagtcagtagtaaataagatgcagcagaagtactggaagacaaagcagactttgataaaagtcactgggaagaaagaagatgagcatgtcgtcgcttctgattcagatctagatgctaaactagagctttttcattcaattcagaggacatgcatggagttacttaaagtgattgagcagtatcagaaacgcatctgcttcttatcgcaagaagaaaatgaactgggaaaattccttcgttcacaaggatctcaggataaaaccagggcagggaaaatcatgcaggcgactgggaaggctctgtgcttctcttctcaacagaggctgtctttgagaagcccgttatccagactccaccaggaggtggagacctttcgatacagagctatctcagattcatggctgacagttaacaggatggagcagtctaggactgaatatcgaggagtgttgctctggatgaaggatgtatctcaagaactggaccctgatacctataagcagatggaaaaattcagaaaggtccaggcgcaagtacgccacaccaaagctgcctttgatagactgaagacagatgtatgtgaaaaggtggatctgctgagagcaagtcgatgcaacctcctgtctcatgtcttaactacataccagaccacactacttcacttttgggaaaaaacctcacacactatggcagcaatccatgagagcttcaagggttaccagccatatgaatttaccacattaaagagtctacaggatcctgtggacaaactaataaagcaagaggaggagaaggagaaaggcaaagaggatcctgctgcaaaaccagacgatgagctcatttctttagatgacatgcagcagactgaggaatctggatcaccaggtgaaacaaacaaaggaaacatatccagctttgatgagtttctccgggagaattcagtaggtgcactagatgatttattggatctgaaaccggaggagaaaatgttctatgaagaagctgcagttcccaaagacccgcttgatcctgacgctggagataaagatgaaatgcagctgctgaatgatattctaggtgcttcttccttggagggtgacgatcttggcaaagagtgggcgtcagtatttggagatgcgatgcccagtcctcatcctgtgagcccgggagcaatagaccaggaacaacactctgattcatcctctgggttccttccttctcagctcctagaccaagacatgaatgacttactgtcctcattgcagggcggctggacggccaacagtggggcttcatctagtccagcagctccccctcccaacagcttcaattccagtgctaacaaggcaccagcaaaagatgtctctaaaactgcaggatccaaagatctgagcgcttggtacaacctcttcgctgacctcgatcccttgtccaatcccgatgccgttgggaaaaccgataaggaacatgaactgctcaatgcctaattccagccctggggaagcagaataaactagaagaaatcaattgccggccggctccttttgtacaataacctgttgttttgttgtgagttgcacaagggaaagtttccccactgatcccctgcgttttgccaaaagaaacccaaacactatgttacggggattctacttgcaacttatcttttagaagtgtcttcatgagatgaatacagaaaggctgctcggcttttgttaagtggaagccggaactataagatccatgccctgggctctgtccgtgtgtactcaattgtgcagttattcagttcgagactccaggtcccaccgggcacatataaaacacaaagagtataatctcctgacctttgcctgttgtcatgagcttgtcggcagtgtcattccagaatcctttaataaaactggtttttgtcaaaaaaaaaaaaaaa

SEQ ID NO: 203 - DNA, 3761 bp, Xenopus laevis
gccgaattagtgctagcctggcaccccatactagcgcctctccctggaagtgcgtgcctattggcggctctcgcagtcacatacgcaccaggaatgagtatagaaatccctgaggggctgaccgagctactgcagagctttaccgtgcaggtgttaaggaagcagcccgaggacctgctggaattcgccttgcagtacttcacccagctcaagcagtctcagagccagggcgcccccttcagccatggcatgggattacccttcagcctcactaaaggggtcaatttcgccgaggagcccagcatgcagactgactctgaaaacggcgaagaggatgaagaggactttgtggctccagtgataaacagattttcaagaagagcatcagtgtgtgcagaagcctacaatccagatgaagaagatgatgacactgaagtaaagattttatttccaaaaacagatgaccaacggaatcgactacaagaagcttgcacggatattcttctgtttaagaatttagatcaagaacagatgtctcaggtattagatgcaatgtttgaaaaactcgtccagtgtggagaacatgtaattgatcagggcgatgatggtgacaacttttatgtaattgacaggggaacctatgatatttttgtgaaatctgatggagttgcaaggtgtgtttgtgcctatgataaccgtggaagttttggggaattggcattaatgtataatacgcctagagctgctacaattgttgctacatctgttggtgctatatggggtttggatagggcaactttccggagaattattgtaaaaaacaatgccaaaaagagaaggctgtatgaaaattttatagaatcattgccattcttgaagtcattggaattttcagaacgtttgaaagtggtggatgtcattggcactaaaacatactgtgatgaagaacaaatcattgctcagggtgatggtgcagatagttttttcattgttgaatctggagaagtgaggataactatgaaaagcaagagcaagccagatgctgaaacaaatgaagctgttgagatcgcccgctatatcagagggcagtattttggagagctagccttggtaaccaacaaacctagagctgcttcagcctatgctgtaggaaacgtcaaatgcttggtcatggatgtgcaggcttttgaaagactcctgggaccatgcatggagataatgaaaagaaacattgcaaactatgaagaacagcttgttgccctgtttggaacaaacatggacattgctgatcccagtacatgaatggtgaacacagaagagatggtttgggatgaatatgagcacagcagtggtcagatcactgaaaatgtgttaatcttttatacagatgcaaagcattttatgtacttttttttttttacaaaccatgttttacaatactagagaaattagtttttgcatttgtctgctagccaaagttaggataattcaatctaagttgttgtggggataggcatgcagcttttgcagaatttcaacagtgcttctgtgtgttatagtacagaaaatctgtagttcatgttatggcccatccacatactatataacttttgtactgagtcatgattcatgttggctaaaactcctctggaagcacaatggcagaattaaaatgaatcacaagcaaatatatttaaatcctgttgcctttattaggtaattgtataaaggaccgtgtatgggtggattataccatcagaaaatgcaattgttaaaaggtacctgtatataataatgcagttgctaggcagtgctgtaagaaaatggtactatgtcagttgtatattaatttcaagtttgtacaatgacgttttaccttagagactggtggacaagtattagtatgacattaattgtgttgcaaattttgtagatggactcttcctgtaataatacatcttaatgtagattattctaaaatgtgtataggacctattatctggacactagatactttttccaaaaatctctgcaaaattgcagtagtagtgtttaattaaaaatcccacagttgtcatttttgactggtttttgaccttgtacttaatgctaactaagctatctaaaatacaggttgttcgcaaatcgttcctatttttttttttcaattagcttttagccttgaaggggttgttcacctttcgaacacttttttcagttcggttgttttcacattgtaccccagaaatagactttttttttcaattattttccattgtttattttttactgtttttctaagatctatatttaaagtttaatgtccctgtctctggcagctcggtggttcggatgcagactgtagactgttacagttttgcagcatttggttgatgcatttctcagcggcatctctgtagtgttggcaacaattgtatcaattttaacgggaattctgctcagcagggacggagatgggaggtgtgtcgactagatgtgtcagtttggagcggtttgcggggtcggcggcccccccttcccggagctgctttagagggtgagagttacacttcagtgttggagagacggccacatgtagagggtggaaggtgattggaagaatgtcgtcttttctggtgatctgtctgggggcagctatttgtttgaaggtgaacagccgctttgaggtacagtgcttcaaattatggaaagaacccttagggctcatgcattctggatactagatattgattctgacattttgtttaatctgaacctgatgtaatttacagctttattgctgtagtgagtgcattatagaaaaatcaaaccaaccaactacttgttcaaaattagctattttgtattgaacagggggagggtagtggggcatgaaagaggagttgaaaatagaggggaaggttcaatcttggtcattcaggagggatcattgcatagtgtgttcttcataggtacctcaggttgtgttgttggcttccagctgtaggctgttcaggtacagtcggctgaccacagaaaccactccagctttccttcatagctcctctctagagctaaagggtttatagagagtttatctctgatagtctccattgctataatccagttcactttaattatcatttctattaacaagggatttgtggttgtttgcctctgtaaggatgtggttggccagtttgttggattgttttgagagtatttctcgcattttcatgcccaacagaaatgtttgtgaggctttggagaacagagtctctaccattttccagaacacttgaacaatctgaaaccaactgaactgaaaaaagtgtttgaaggtgaacaacccctttaaacagtctattacaagtcagaaaatgaaaggaaaaacatgattgattcctacaggcatatttttccccaagagtttacttttaaaagtcattatttttatataaatgaaagtaagtaagctttattcatagagcaaactaaaagcaaagttgttagggtgatctgcattgtatatacatgcaaaattatctgcctttgtataaatgtaaaattgtcattttttattgttaagatacagtaattgctctagatttcagttgtatttaaaatgaagaaaaataaaccagtcatacagaaaaacagcaccatatactaattagaataaaaagtattgattgttttttcctcatgaattcaagtacactttaaaataaaggacacatttaattaaaaaaaaaaaaaaa

SEQ ID NO: 204 - DNA, 1293 bp, Xenopus laevis
cccacgcgtccgtgtgcgccgactttcccggcgcaggttgtcaagggaaggacggggtcatgttttcaagtgcagcgtcccgaggcctgaggctcacaggcagaatatgcaccgggaacgtggcccagattcatatcagctccaggcacagtctgctctatggctactgggcatatgtatttggagagagaaccaccaaacggtttgggccaaacagcaagattattacagtggatggaaacttggcatctggcaaggggcaacttgcaaagaacctagcagatagacttggtatgcgatactttcctgaagcagatgaacattacttagacaagacaactggggatggaagtatcctgccatcaaagtttaatggaagttgcagcctggagaagttttacgatgacccgaaatgtcctgatggaaactcgtatcgtttgcagtactggatgtatagtgtgcgcctcatgcagtattctgatgctttggagcatcttctgagtacagggcagggagcagtactggaacgttctccattcagtgactttgtgttcctggaagcaatgtataagaatggattcatccgcaagcagtgtatcgatcattacaatgaaattaagggtaacagtatagatgagtttttgcctcctcacctggttatatacgtggatgttcctgctgctgaagtgcacaagaaaatcttggagaaaggacagacttctgaaaagaaagttgccttgccataccttcagagtattgaagacacctataaaaactctttccttccacagatcagtgagaattctgagattctgaagtactctgggaatgaggcgcatgatgtagaaaaggtagttgaagacattgaatacctgaagtttgacaagggtccatggccagaacagaatgacgtcacctatcatcatttgcgcatgtttgtggaggacaaagacaaagttgccagtctgataactgtgcctagttacatcccagaaatcacaattggtgcatcagagtatgattccgcttattatcagtaccgattgctacctggcagaaaatatgcaaagggctacaatgcagatattggggacaaaatgatctggctgaagtaaaccatctgggactaagaactgccaacaagcatcctacacagtgctgacttccaagatttataatgatttgcttggaggaagccttagtgcagtttttcaccgttatttttctctctgacagtttgtgctgttcccatacaaataaagtatatttaaattttctaaaaaaaaaaaaaaa

SEQ ID NO: 205 - DNA, 1858 bp, Xenopus laevis
cccacgcgtccggccatctaatgaccggaagctgcgagcatttagttccgggtcacaaacatggcgcaggttgtacacataaaggagcagaagtatgacaggcagctcaggttatggggtgaccatggacaggaggcgctggaatctgctcatgtttgtctaataaatgcaactgccactggtactgagattctgaagaacttggtgctacctggcattggcttatttaccattgtggacgggaacgttgtggctggggaagatgttggtaacaactttttccttcaaaaagaaagtattggaaagaatcgtgctcagacttccatggagcttttacaagaattaaatgatgatgttactggcaattttgttcctgagagcccagaacaacttttagataaagatccatcattcttttgcaagttcactatggtgatcagcacacagctcccggaaagcacacttctacgcctggctgaaacactctgggattccaatattccactattagtctgccgcgcatatgggtttgttggctacatgcggattattgtgaaagaacatactgtgattgaatctcatcctgacaatgcattagaagatttaaggttggaccagccatttccagagctgagggaacacctacagtcatatgatttggaccacatggagagaaaagaccacagtcatactccatggattattgtagtagccaagtatttagacaagtggcgcagtgagaatggaggccaaatgccaaaaagctacaaagaaaaggaatctttcagagatctgatcagacaaggcatactgaagaatgaaaatggggttccagaggatgaggagaactttgaggaagctattaaaaatgtgaatactgcattaaatattacaaaggtttccagtagtgttgaggagattttaaatgatgatcgctgcaccaatcttacacatcagtcaacttcattttggattttggctcgagctgtgaaagagttcatggcgatggaagggaaaggcaatttacctcttcgagggactattcctgacatgattgctgactctgacaaattcataaaactgcagaatatatatcgtgagaaagccaaaaaggatgcttcagctgttgagagttgtgtttccaaactcctgcaatctgtaggcagacctccagagtccatatctgagagagacattcgcttattttgcaggaactgtgcttttcttagagttgtcaggtgccgatcattggaagaggagtatggcttggatacagccaaaaaggatgatattgtttcgttaatggagaatccagacaatgaaattgtgttatacctgatgctcagggctgttgacaggtttcagaaacagcttggcagatacccaggcatttacaattaccaaatagagagtgatattgggaaactgaaaagttgccttaatggtttgcttcaagaatatggtctatccctgactgtgaaagatgagtatatccaagagttctgtcgatatggagccgcagaacctcatacaattgcttccttcttgggaggtgctgctgctcaagaagccattaaaataataaccaagcaatttgttatctttaataatacattcatctacaacgccatgcttcagacctctgcgactttccagctctagctacattgtattataggtgtaaatgcattttctttatagcagttttattgtctgtgacttccttaaccttgaatatgttaaaataatttcttttgatatttagaaaaaataaaaaacccataatgtgggcacagttatgtataagaattgataacaatgagtcatttaaataaagcattttaaaaaaaaaaaaaaa

SEQ ID NO: 206 - DNA, 1072 bp, Xenopus laevis
acgtgacttgtcttcaatcccaggatcatcccaaaagtttgaggtgaaaatattcctcgtgttggccccatggaagatgagctggcgctgtctgatcagggctccgatgaggacgaggaggtccttacacctgcagagcttataaataagttagaagaggcctggctcaatgagaagtttgcaccggaactgttggagagcaaatctgaagttgtggagtgtgtaatggaacaactaaatcacatggagcagaatctgcacagagcaaagcctggggatctgaagatcagcttccaccacatggagattgagcggatacgatacatgctcagcagctacttacggagccgcatgctcaagattgagaagttttttcctcacattcttgagaaagagaaaagcagaggtgagggagaacctccacacctgtcccctgaggagtttgcctttgctaaagaatacatgacaaacacagaaacactattaaagagtgtggcgcttcgtcacatgccaccaaatctgcaaactgtggatcttctcaaaagtgtcccaaaaccaaacctggattcctttgtattcctgagagtgaaggaggaacagaataacatcctggtggaaccagagacagatgagcaaagtgaatatgccatagatatggaggtcggatctcaacatctcatccgttatcggaccatcgctccccttgtggcttcaggagctgtgaaactcatttaatgctacagagtggagcaacctttgtctcatcctggagggggcagcaaaacagtagtttagtaaagcaccacttgcattcatcaatcactgaaggaagcaaaactgaagatctgatttagcagttccactatagcagaaatggggaatcatcaacccattatcatggatgtccttgggaagaggtgtgctttgtgcaatgctagtgcaagctgagttgtgagtataaggtcgcacaaagctccgagacaatgcaatgctcctggattttcattctaatgtaaaatatattgctgatgaggtaaagtcatcatcctaaaaaaaaaaaaaaaaaaaaaaa

SEQ ID NO: 207 - DNA, 979 bp, Xenopus laevis
ggacgaggcaagatgtgcgacttttcagatgatcagattatcgacttcaaggagtccttccaactttttgaccgtgtgggcgatggcaagatctactacagccagtgtggggacgtcatgcgggcactggggcagaaccccactaacgctgaggtgatgaaggttctgggaaacccaaagtctgaagacctgaacaccaagacactcgagtttgaacagttcctccccatgctgcaagcaattgccaagaacaaggatttgcctggattggaagaaatgctagaagggtttaaagtctttgacaaggagggaaatggatttgttatgggctctgagatccgtcatgtcctcatttctctgggagagaagttgacagaagatgaagtagagacccttttaagtgctcatgaagatgccaatggttgcattaactatgaagagtttgtcaggcacatcttatcttcgtgacttcactccgtggaacttatccggacggtattgaacggctgaattttctccatagtttaactctgcccagtggggatgatgtgcggggggaagttagttagcaatttattccaccccttcactagaggggaagacaggctatttagtaagtgccttttctgcttcctcgtggtccaatcattcaccccccctctcctctcagaagtgatgagttctcattctttctgtgacatcgcaagggaggccgagagctacagattcaaccgtcatcagaagaaattgtggctaaggaattttttgtatccccctcctgcttctccttaattcagtagtgagcagagaaagataaattattcaaatttctatttttccccgtccaacctcaaataaacggagtgactttttttttttcaaaaaaaaaaaaaaaaaaaaaaaaaaaaaaaaaaaaaaaaaaaaaaaaaaaaaaaaaaaaaaaaaaaaaaaaaaaaaaaaaaaaaaaaaaaaaaaaaaa

SEQ ID NO: 208 - DNA, 1491 bp, Xenopus laevis
ttctagtcagtgcacgtggggtcggagcagagcagcaatgttgcgcagggagttgcggctgcgcagggagtacctgtacaagaaggcgcaggaggccaagctgcacagtattgaggagaagaaggagaggctgaagcgagcgctagaagagaaccgactgatccccacagagatccgcagggaggcgctgaccctacagaaacaacttgagtttgatgatgaaggaggagaaggtgtctcctcccatgtggatgatgagtacaagtgggccggggtggaagaccccaaaatcatgattacgacatcgagggaccccagctcccggctgaagatatttgccaaggaaatgcgactgatcttccccaatgcccagcgcatgaacagaggcaaacacgaggtgggggcactagtgcaagcctgcagggctaatgatgtcactgatctgctgattgtacatgagacaagaggaatgccagatgggttaattgtttgccaccttccgtttggccccaccgcctacttcaccctgtgtaacgtggttatgagacacgacatcccggatctgggcaccatgtctgaggccaatccccacctcatcttccacaacttcacttctcgcctcggccaaagggtggccgacatcatgaagtacttgttccctgttcccaaagatgagagcaagagggtggtaaccttcgctaatcaggatgattacatttcattcaggcaccacgtgtacaaaaaaacagaccacaagaacgttgagctgtcggaagtggggccacgctttgagatgaaattgtacatgataaagctgggcaccctggagaacgagagcacggccgaggtggagtggagatggcacccgtacaccaacaccgccaagaaaaggaagtacctcagcgctcaataggccacgtgtctccccactcaataggccacgctggggagattgtttttgtgtaaagggaggggcaagttgacatttatagtcacagtgggttggagaccccagatcccacacactggctccatgaagcaccgctgggggagtgggtgtagccggcacatgctgaagtttatgttgggagggggaaccagcgcctgtgagggcccagtgttcatttggaccaggctgagcctccctgcagacaataagtggacggacagacagacggttccacgagatcccactgaacagaagcaaatgactcacaagacacaaattactttatattgagggggtgctcgttttatcacaatggggctcgcgactgggctcacaaattcctttcttgcccaaatatcgctgtttagcaaagttattacattagggttattgcaagtgttttgtccaatgaaggggcaccaggcccccatgttttgtcagttgttttgtacaggggctttgcaaaccttattaattcatgggagggggggggcacaatctattacaataaaaatgaatgtagaaaaaaaaaaaaaaaaaaa

SEQ ID NO: 209 - DNA, 627 bp, Xenopus laevis
ctgcgctggaaagaaaaggttccgtttgctaagaagccggtttagcgatgaataccaaggctctggggtcgcagctcaaggacagtatcccgatcggtgagctttccacgcactatggaggatacgggatccaagatactctccgtactggctttacaagtgtgcaaagtgagctcatgccaagccaccctctggagctctctgagaaaaactttcagataaaccaagagaaggtgaatttctccacagttagaaatatccaagggctgcacgctccattaaaactgcacatggagtttaaagcagtcaaacaggtccagcgtctcccattccttcccatttccaacattgccttggatacgttgaggggaactgacgagtgcattagctttgaggatatactcaatgatccctcacaaagcgagctgatgggagagccgcacttgatgatggaatataaactggggttattgtaacatgtttgtgggtgaggggtaataacgtttttgtaaataaataagaaactgggggtttgtacctcggtcagggaacagtttagaaagcacatttcttcagtttccacaaacaataaaaacttgtttattaacgggcaaaaaaaaaaaaaaa

SEQ ID NO: 210 - DNA, 3883 bp, Xenopus laevis
cgggattttctgaaagtccaggaacaggaaacttggggttatcagctgtgcggaatgtttttatctagaggctgaatcatgtatctcggttttgaacaagtagcgctggtgggccaagtctttgaatcctttgtgctggagcaccacaaaaatgagattgcccagatacttactgagaaagaagagcatgcccactactcactggttgttaatgccatgacactttttgaagcaaacatggagattggagagtactttaatgcctttccaaatgaagttctgcccgtctttgataatgctctgcgctgtgctgccatgagctttcttcagtcttgttcagaaaaatacacatttcttatgaagcagaatcttcatgcaaggataacaggtctaccagtgtgcccagagttaaccagagagcacataccacgaaccagagatgtggggcatttcctttctgtaaccggtacagtaattcgcaccagcttggttaaagtgctcgagtatgagcaagacttcatgtgcaacaagtgtaagcatgtggtcactgtgaaagcagactttgagcagcattacacattcaagccacccatcgcttgctcaaatgaggaaggctgcaactccaccaaattcacctgtctgtcagattcatcctctccagccagctgcagagactatcaagagatcaagattcaggaacaggttcaaaggctatctgttggcagtatccctcgatcaatgattgtagttttggaagatgacctggttgacagctgcaaatctggagatgatataacagtctatggtgtggtgatgcagcggtggaaacccctttatatagacatgcgctgtgacctggaaattgttttaaaggccaattacatttcagtcaataatgagcaaccttgtggtgtggttataaatgaagaagtacgcaaagagtatgaagatttctgggtgaagtataggaacaaccctttagaaggtaggaatgaaattctggccagcctgtgtccgcaggtatttggtatgtttgtagtgaagctggcagtggccatggtgctggctggtggagttcagagaattgattctgctggaacaagagtgagaggtgagtcacatcttctgctagttggagaccctggcacggggaaatcacagtttctgaagtatgctgcaaaaattactccgaggtctgtccttactgcaggcattggatctactagtgcaggcttgactgttactgcagtgaaagactctggagagtggaatctggaggctggagccttggtgttagctgatggaggcctgtgctgcattgatgaatttaatagcatcaaggagcatgacagaaccagcatccatgaggcaatggagcagcagaccatcagtgttgcaaaggctgggttagtgtgcaagctgaacactaggacaaccattttggcagcaacaaatcccaaaggccaatatgacccagacgaatccatctcggtgaatgtagcccttgctagccctctgctcagcagatttgacttggttctagttttgctggataccaaaaatgaagactgggaccgcattatttcttcgtttattttggagagtaaaggctgccctcgtaaatccgataagctatggagcatggagaagatgaaaacctatttctgtcttattaagaatcttcaacccaaaatgtctcaagatgctaatgttatcctggtacgttattaccagctacagcggcaaagcagttgcaggaatgcagcacgtactactattagattgctagaaagtttgatccgcctagcagaagcccatgctcggataatgtatcgggatgttgtgaccaccgaagatgccataaccgtggtgtccataatggagtcctcgatgcagggaggtgcattacttggcggtgtcaatgcattacacacatcctttccagaaaatccaagggaacagtatcggcttcagtgcgagctcctattggataaacttgggcttcagaaattgctagaggaagagcttcaaaggctagaaaggcagcaaagtgaagactcccttgagtctgatcttggggaaagtgcaacaaacctcgttggacataaagtagtgcacagtgagtgtgtcatggaagaaaccttcagcacttttgaagcttcttctttgccagatgaaacacacctgggagtaactggcagtgctgcattcatacagactcctaagaaaaccatctccgatatgaccaaaagtgatgacaccattaggaagggtaccattacacctgctgaacaaaacagaggtattagcacagatgccgagtcctctttaaaacaaggtaatgcacaaccactcgctggtgggcatctctctgaaaataatcttacaaaatgcactgataacagtcttggctggtttgatacacttcaatccattcagatgtctcccatcaccaaacaaagagaaggatgcacagctgaaaagcttcaacaagaagtccttcctgtatcaacagaaagtagctgccatcctgcagacaaaaaagttgtaaatttaggagggaggaacaaacttgaagttttgcaagctagtggaagcagccctgggggaaatggaagggatttgtcaaatcacacagtgacttgtggaagcagccctgagagaaacaaaagagatttgtcaaatcacatagtgactgagcatgtttctaaaaagtggcggagaataaataaagattccctttgtggaaaaaatgtgccatctttccagcctcagtctgaaaatacagattcggctccagtctgctccagtgttcctctgcatagtacccctgatgttgcccagagaaggaaaagaattattgcccaggtggaaaagcaatcgaaagcagaagtggaggatccagacacaaaagcacgactagcccagttggccaagttttcatttaagcgacattcaaaactggtgcattcacctgcaggggatactgacacagcatcaaatgcacagaaacatgatcacccagtccagaaaattacactatcagagaagttgaacaatttaggtaggactgtaaataatgtggataaatcaagcaattctgttaatggctcaaagcagcaaaagcatgtagagaatacatccaaacagactgtaataacgcagaagagtaactttgaatcgaacacattaaacgctcctgtgcatgagacaaagttgaatgaggggtgtgactccagaaaggtttcttctagtacacttgctaagttagcacgcttttctttctcacctcctcctgaaaatcaagcagcggagaccagcaaggaaaccctgattttaccaagagctgttgctccaggcagcaaaagaaagtgttttgaactgaatccttccactgataaaaccacaatgtcaagtaaatctcttttctctacaacagacttagatgatgaagagttagatgtggattgggaggctgaaataaaaggaaatcagagaattgccacatgaagaagcagtatgtgttgtttgggtgttatttatcgttatgtacacacgaacagtgactaattggtcatacaggtataccagttacagggacatttcagaaagtaaatcaaatcattctacaacagcaggtggcagtgttgagaattaggtcactcaattcattttattttacttcatagaattccatattatgtggttcattactttaccatttttgttgtatcgtgaactgttaacctttctgtaactggttgaaatgatttctgtaaaatgttgttttgtgccttatgcacgtaaaacttttttttccaaattatacactgtatttctaaaaatgtagaggtactgctaaaaaaaaaaaaaaaaaaaaaaa

SEQ ID NO: 211 - DNA, 2717 bp, Xenopus laevis
gacatcacttccggggttgggtcggcgtctcgttttccggaagttgttgcaagtgtcgcgtttgtagcgtgtttagtcggctatgaccgaggttgtcagtgatggctggaagggctgcgggtgtaaagggatccgatcctgtttgttgtgcgagtcaggcgggaaaactgtgacagcgggggatcatgagggtttcaataagaaattacagttcttctacagttcattagaaggcatagcaaaggggattgatggctgctggttccattttccaggtgtgcatctgataaaggattttgtgacagaagatgaggagcaacgcttggtacaatttatggatcaaggagagtggagacattcacagtctgggcgaaggaagcaggactttggtccaaaggtgaacttcaagaaacagaaactgagagttgggaatttctcaggtcttcctaatatcagccaagtgctttgggaaaggatgaagcagcatgctgtcctcgaaggattccttcctgttgaacagtgtaatctggattaccattcagagagaggctcagccattgatccacactttgatgactcttggctttggggtgaacgtctggttagtctaaaccttctttcagatactgtgctcaccatgactagtgacgatgtaagtagccttcagctgatgccagttctacagaaaggagctgaactaaatatgactggttcagataacaatgcaagtgatgtgaacattggacagaatccagtgtctaataactctcaggccaagcaagttccctgcagcaatgtggaagtagccatatgtttaccccgaaggtctttagtggttttatatggagatgcccgatataaatggaaacacgccattcatcgtgagcacataaagcaccgacgagtttgcagtactttcagggaactgtcagtagagttcagcttgggtggcaaggaagagaaacttggggaaatgttattaaagatagctcttggctttcaggggaaggcaatataaattgtgaattttctgtctgaatgtttcactggggctttgttggaaatttgatggaaattatacacttttaacatgggctaatattttgcatatacagtataactgatcaggcaatggctctgttgatatgaaggccactcatatgattgtatacatttcactgattagccttttggacagatggagtcactgggttgttggacaatcatattttctgttttaggaaattgtaaaactggtgccaattttggtctgccgccatacccacggcactcacattttcgggtctggaagtgggtccgggctgtccacgtctcagagtgcaattgctctttctgcactagaagagatgaatttccgggttgaaaaccgtggaccctgcatgctcataatcataaaatgttgttggaaaatgatcagactgggtaacccaacttttctacttgaacacagactggctaccctagttggtgcaccagtggccagcataaagcagatgttatacagtgggaccgatttatcatccatcgatgttcattgtgcaggcaggtgacttcctaatctcaccttttttgtaattgattacttttgtttctccccaaaccttttttaagcttttttttccaactagtgggttatttatggtacgctcatggaaaattattttatttttttaaaaccagttcagaaaaaaacccaaaaagcaagtcactcacctgcaattgtttttttttaaagtaataaaaatatataaaataaaaatgcagggctacagtataggatattttcccatcagcaactcgtgactatatctttaataaccccattatggactgacctctgtccctgatgtcccagcagtcagtagcaatatgtttctcatgaaagagcttattaaaatgatagcgacatgtttcacttctatgaggaacatgatgtcacgttgaaagagactgttgtatatattctatcagcaaatctgtttctcttacctctgagacatgagaaactgatttataatcatgtgttatacctaaacaaacaacatgtctgtgtcaatgaaataagcaaggctgatcgcacatgagcagaaaaaaacacgagtactgcaaatttgcccaccggctgaaagcaccacatgtacaatgagcctgaatatatgattttagaaatgacatcctgaattatcatcactagcgtgcagctaaggggacgtatcaaaatatgtgttttaaaagattgtggtttttgtttgctgctgtgctacagttcatggtaaagcagaagcagtaatcatggggctgcatttgcatcatattggtgatttctaaatatcttttatcaggagcagactaacatcattctctgccatctcagtgctgcctctgttcattgaggggctattttatgtgcacttgcttggatgctcattgatgtatttttcagtggcggggaattctttataaatgagagagagccccatatgctgcagtggttgcagttggggacaagatacatgtagaaacccaagttcgtgtgaataggtgccacggtttaatgttaggccttaatgaatgacaatcactgctttaatgtcgctggcagtgaaatgattttaatgaatgtatcatttttattctgcaataaagtaatgcatatctcaaaaaaaaaaaaaaaaaaaaaaaaaaaaaaaaaaaaa

SEQ ID NO: 212 - DNA, 3115 bp, Xenopus laevis
cacactcactgatattgccgcagggacaaaggcacgagagacaccgaggggctcaaccgacccccacagtccgctcttgggattgaacgtctttccccggttctaggaatcccctgaaagaagtgagcgcgcaaactgtgcaactcagttccaagccctgggcttcctctgctgcaggtaacgaagagaggtatggatatcacataatcagctttcatcaagaccagctgtgaatatttcacaaatgcttctttccatgcaaaactgtgtagataaaaccatggatgagtcggcattattggacctcttagaatgtccggtttgtcttgagaggctcgatgcctctgctaaagtcttgccatgccaacacacattctgcaagcgctgccttttgggcattgtgagctctcggaaagagctgcgctgcccggagtgcaggactctggtggagtgtggggtggacgaacttccgagcaacattctactagtgagactattggatggaataaggcagaggccaagaaaagcaggggacggtggaagcgctgggaatagcacaaatgctttgagagcacaaggcagtgtaactactaatggtggcttaaacgatgcacagaatactcaaagtgggcaacagagaatacaagcacgaagtcctccagtaaggggtgttcctcagttaccatgtgccaaagctttgtacaactacgaggggaaagagcctggagatctcaaatttaacaagggagacatcatcgtgcttcgccgtcaagttgatgagaattggtaccacggggagattaatggcatccacggcttcttcccaacaaactttgtgcagatcataaagcctttacctcagccgccacctcaatgcaaagcactttatgactttgaagtgaaagacaaggaagcagacaaggattgcctacccttcttaaaggatgacattctcaccgtgatccgacgagtagatgaaaactgggcagaaggaatgctgggggacaagataggaatattccctatttcctatgtggagttcaattcagcagctaagcagctgatagagttggacaaaccatcaggagcagacactggggaaggctcttctggcacatcgcatagtggcaattctcaaaagcaagcagatgcaaagaagaacaccaaaaagcgtcactcctttacctccctcaccatgtctaacaagtcatcgcaatctgtgcagaaccgtcattcaatggaaatcagcccccctgtactcatcagctccagcaaccccaccgctgctgccagaatcagcgaactcacaggcctctcttgtagtgccccgtctcaggatatgaatcctcctcttcttcctcctccaccaatggccactcctgttatcacgtcggcttcctccggagctgctgccgtggcccagagaaatattattggtcctgttgagcaagttccacacttgaggacatctgcaagacccagtgtgttcattgctatctatccttatatcccacgaaaggaggatgagctggaactgaggaaaggtgagatgttcttggtgtttgagcgctgccaggacggctggtttaaaggaacttccatgcacaccagcaagattggcgtgttccctggaaactatgtggcaccagtcactagggcattaacaactgcaacacctgcaaaagttgccatggccacagctactaccagcaatgtggtgaacttggtaacaccaacacctccgggggctccgtgtcagaaactgccagtgagtggagtggagtttgccaagaccagcagcacaaatggggtctcaccagctggtgtccctggctgtcatatccagactagtcctcagtccaaggttctgctgcatatgagcggccaaatgacagttaaccaagcccgcaatgctgtccgaacagctgcggcacacagccaggatcgtccaactgctgctgtgactcccatccaggctcagacccctgctgcatctgctctcccccaacaggctgccgcttcacagcaagtgccacctccactttcagctccagctgcttacattaatgctgcaatgaacattagccggccaagtgtgccggcagcatcggcagcctcctctgctcttcccaccgctgcatttgaagcagaatccagttggaagtctagctctggactttctgggtgttccttttctgaaaatgtttctgcacctttaaattctgctgctaataagcaagataaggatagtaagaaagaaaagaagggcttgctaaagttactgtcaggggcatctacaaaaagaaagcctcgctcgtctccaccgcactctccaacccaagaagtggaacagacaaattcagaagcagcagcagcgctggagggagctgtagggccagacattgtgccagtcattgtcaacggccgagctgctccctgcactgtggattgtgattcagtatctgcctcaactccggcacaggataaccgcaagcctgcttccttggataacaacattcccattgcacctccaccaagacagccttgctcatcactgggctctgttctaaatgattcccggccttgtgaaagatacagagtaatggtatcctacccaccccagagcgaggcagaactagagctgaaggaaggagacattgtatttgtgcacaagaagcgggaagatggttggtttaaaggcacactccagcggaacggcaaaaccggcctcttcccgggcagctttgtggaaaatatttaacttttattttgccacagaatgaatgagcacaagacacgcagccacttcccagagcaaatgtaactgcactgaagaaccattcagcatcttgtagctaggacagtggtaccaagccttgtgccgtatttaactacaaacgatctgaacgagactgctccatctgctgatttcatatctccatggaattttttcgttgatgtatttgtgccttgtactgttaagtttatcagattttttttatacttgtttttttcccccacgaataacaaataaactattgtttacgaggctttaaaaaaaaaaaaaaaaaaaaaaaaaaaaaaaaaaaaaaaaaaaaaaaaaaaaaaaaaaaaa

SEQ ID NO: 213 - DNA, 1653 bp, Xenopus laevis
gaacgatcatcgcatagcaaggtagggagtctctggaggtctcttgatgtctcatgctctctggcaggattgctcttaaccaccttgtgcctgatggcccaatgaactgtgtccacccggaacgggcggccaatgcgacatcttttattcctgtgtccctgcgtgatcggggtcgccttccatctctggctgtttaacttctcaggtttattttcttggtttcttgtatggagtccacatagttatgatattgttgtgggtgtgttatcagctcgacataatcatgaactgcgaaatgtcatacgacacacatggcttcagcacttaaatcatcattcatcattaagtcaacgtgtccttgttaaattcataataggatctcatgggtgtgacatacctgtagaagatagagaagatccttattcctgcaaactcctaaacatcacaaacccaacactgaaacaggaaattgaatcatttagtatcccagatagcgctgctgtaatcacagaacaccatgttgtcaatgtaaacttccgtgtcctgtacccagtggtaattaccagattgggggtttttcagcatgacagtgctgcaggattccagagaaatataactgtcaaacttttccaaaccgaacatgaggaagcactctttagtgcccgttttagtcctgctagttctggtgtacaagtaaacggaatatggtacaaacctgtggaacagttcatattaccggagggctttgaagggactgtagtatgggagagccatgacccagaaggtctactttcaggaaatgtgcaccatgttattgtaaatgatggaggtgggatatttagacttacaacagttaaagagggtttgttgccttatgaatttacagaaggtgtcgagggcattgcaggaggatttacctatactattcatgagggtgagacacttttaaatactctagagacacgcccagaaagaatacagaatcatttagctgcactagaaaaagaagatgccttattacaggaggaaagcacaacttttcaagatattgtttttgtcaacgttgttgacacgtacagaaatgttccttctaagctactaaatttctatcgatggactgtacaattaacaagatttgagtttttgctgaagactgatgatgactgcttcattgacattgacaatgtgttaaagatggttgctcaaaaggagctacagaaggaaaatgcttggtggggaaattttaggttaaattgggccgttgatcggactggaaaatggcaggaattggaatatcttagtccagcctaccctgcatttgcctgtggttctgggtacattatttcaaatgatattgtccagtggcttgcagtcaattctcaacgactgaaaacttaccagggtgaagatgtgagtatgggaatctggatgtcagcaattggtcccagccgatatcaggatagtcgttggctgtgtgaaaagaagtgcgaggccgggatgctgtcgtcaccacagtacactccacaggaactaatggagatttggcaacagaaagaacgatgtgggaatccttgtgcatgtgaagacagatgaccaaagaacctacccattcatataatataataaattttatactgcaaaaaaaaaaaaaaa

SEQ ID NO: 214 - DNA, 1648 bp, Xenopus laevis
tggctaaagatggctgcgcgcaagaccaaacatgcgtgtcggatccaggacaagcgaagtgatgctgagcgccaggatttggacaccaaacttgcagccgtactggaaagtagaggcaatgctaacgcggtgttcgatatactggagcatctggagtccaaaaaggaagaagtcgtgcaagccgctattcgaacagcttctaaactatttgaagttatgttggagaaaagggaactttatataggagacttgccagcggagaatggcacccttccagacacatacagtgcagaagacaagtacaaaatgtggatgagacatcgctacaatagctgtgcggcctgcattctggatctcttgcagcacagctctttttctaaccaggagcttgccctatgcacactgatgaagttcatccagctggaaggaaaattccctctggaaaattcagaatggaaagatagctaccggtttcctagagaactgttaaaatttgttatagataatttgctgcaggaggaagcagactgtaccctattgatcacacgtttccaggaatacttggaatatgatgatgttcgttattatacaatgactgtgactaatgattgtgtttcacgggtacagcaaaagaacaaactggtcttgccaccagttttccaaaccaatgtcttttgcttgctttcctctattaacataccagttgaggagagtgctttgggaaatttccttgtaaccaagaatgtaaataatgaagactggaaaccgtcaaaactaaaggaccataaaagggtgtttgagagggtctggatgatcttcctgaagcaccaactctcggtcagtctgtacaagaaggtgctattgatcctgcatgaaagtatcctgccacatatgagcaaacccaccctaatgatagacttcctaactgcagcctatgatgttggtggagccatcagtctactagcccttaatggactcttcattttgattcatcagcataatctggaatacccagatttttacaagaagctttactctcttttggagccctcaattttccatgtaaaataccgtgctcgtttcttccacctggccaacatgtttttgtcttccacgcatttaccggtttaccttgttgcggcatttgcaaagcgcctggccaggctcgccctgacagcccctcctcaggtgcttttgatgattatcccatttatctgtaacctgatccgcaggcacccagcttgtcgtgttctcattcatcgccccagcgctggagatctggcaactgatccttacatcatggaagagcaagatcctgccaagagccaagcattggaaagctctctgtgggagctggaggttctacagcagcactatcatggtgatgttgtgagagctgccaatgtgatcagcaggccactgtctgcacaggaaagtgatatatctgggctgttagagatttcatcctgtgagctctatgacaaggagatgaagaagaagaagtttaagtccgttcctttggaatatgaacccgtccgtggccttcttggattaaaatctgatattactgctcaacacttcacattttgaatttgattagtgcgtaataaagattggcagaatggaaaaaaaaaaaaaaaaaaaaaaa

SEQ ID NO: 215 - DNA, 2985 bp, Xenopus laevis
cttacactctgctgctctgggcgacactgggggactcacagctacaaggagagcgattgcggcgggaataaaacgggcagcagcggaggatggatcattatgaggagcacaataagtatatgccgcaggaggatgattgggacagggacctcctactggatccagcctgggagaaacagcagagaaagactttcacagcatggtgcaactcacatctccggaaagctgggacacagattgagaacatagatgaggatttcagagatggccttaaactcatgttattacttgaagtcatttcaggtgagcgtttgcccaaacctgaacgaggcaagatgcgtgtacacaaaatctctaacgtcaacaaagccctgaattttattgccagtaaaggtgtaaaactgatatccattggagctgaagaaattgtagatggcaatgcaaagatgacattaggaatgatctggacaattatccttcgttttgctatccaagacatttccgttgaagaaacatctgccaaagaaggtttattgctgtggtgtcaaagaaagactgcaccctacaaaaatgtgaatatccaaaacttccacataagttggaaggatggtcttggtttctgcgcccttatacatcgccatcgcccggaacttatagactatggcaaattacgcaaggatgatcccttcacaaatctaaataccgctttcgatgttgccgagcgtttcctggacatccctaagatgttggatgccgaagacattgttggaacagcgcgtcccgatcagaaggccatcatgacctatgtctctagcttctaccacgccttttcaggagcccagaaggcggaaaccgctgccaaccgtatctgcaaagtgttggccgtcaatcaggaaaatgagcagctcatggaagattatgaaaaactggccagtgatctgctggagtggatccgtcgcacaatcccttggctagaaaacagagccccagaaaacaccatgcaagccatgcagcaaaagctggaggatttccgggactatcgtcgcttgcataaaccccctaaggttcaagagaagtgtcaattggagatcaactttaacacccttcagaccaagctgaggctcagcaaccggcccgcattcatgccttcagaggggaagatggtctcggacataaataatgcatggggaggattagagcaagccgagaaggggtatgaggagtggatgttgaatgaaatccggaggttggaaagactagaccatttagcagagaagttccgccagaaagcatctattcatgaagcttggactgatggtaaagaagagatgctgcagaagaaggactatgaggctgctactttgtctgatatcaaggctcttctgaagaaacatgaggcctttgaaagtgacttggctgctcaccaagacagagtggagcagattgcagcaatagcgcaggagcttaatgagctggactactacgactcgccaagtgttaatgcccggtgccaaagaatctgtgatcagtgggataaccttggagctctgacacagacacgaagggaagctttggagagaactgagaagttgttagaaaccattgatcagttgtacttggaatatgccaagagagcggctcccttcaacaactggatggaaggagcaatggaagacttgcaggacacttttattgttcatactatagaggagatccagggattaactgcagctcatgagcagttcaaggcaacgttacctgaggctgacaaggagcgccaagcaattctaggaattcagagtgagattgccaaaatcatgcagacgtatcatatcaatatatctggctcgaacccctacaccagcatcactcctcaagaaatcaacaacaaatgggaccacgttagacagctggtcccccgtcgggatcaggcacttacagaggaacacgcccgacagcagcagaatgaacgactgcggaaatcgtttgctgcgcaggccaatgtcattgggccatggatacaaacaaagatgccggagattggacgcattgctatagaaatgcatgggaccctggaggaccaactgaatcatctgcggcagtatgagaaaagcatcgtaaactataaaccaaagattgaccagttagaaagcgatcaccaacagattcaggaagcacttatctttgacaacaaacacaccaactacaccatggagcatattcgcgtgggctgggagcagcttctaaccactattgccaggaccatcaatgaggtggaaaatcaggtcctcacacgagatgccaaaggcattagccaagagcaaatgaatgaattcaggaattctttcaatcattttgataaagatcactctggcaggcttggcccggaggagtttaaagcttgtctcatcagcttgggttacgatattggaaacgatcctcagggagaagcagaatttgctcgaattatgagcatcgtcgatcccaatagacttggccttgtaacatttcaggcctttattgacttcatgtcccgtgagactcaagacactgatacagcagatcaagtcatggcttctttcaagattcttgctggagataagaattacatcactgcagatgaactgcgccgggaactgccccctgatcaagccgaatactgcattgccagaatggctccatacatgggacctggtgctgttcctggagccctggactacatgtctttctcaacagcactatacggagaaagtgacctttaacccttccctccccactcacgtgtcaccgcagcagcgctttttctctctctctcccatgtgctttcagcgttcacgcctcttgtgtgtcatttcttagttcaccagaagataaaaatcacgttccccccccccctttttgttttgtgctgggaactctgtctggcactgcaagggttaatacctgttcagaaagcgagagtttacaaataaaaaaaaaaaaaaa

SEQ ID NO: 216 - DNA, 3147 bp, Xenopus laevis
ccagtttgtgacgtgtttaattccattgagccccggggctgcggggtttgtgcgctggttataggggcaagtgagtggaagtgacatccctacagctgtgccatagctagtgcttccccatggcgtgcaagtccaaagtggctcccagtgtcgattttgaccacagctgttctgacagtgtcgaatacctgaccctgaatttcggtccatttgagagtgtgtaccgctggcggaggcttcttccctgtgacgagtttgtaggagccaggcgcagtaaacacacagtggtagcttacaaggatgctatctatgtttttggtggagataatggaaagaatatgttaaatgatcttttgagatttgacgtgaaggattgttcctggtgcagagcttttactacagggagccctccagcaccccgataccaccattctgctgtggtctatgggagcagtatgtttgtgtttggtggttatactggagatatttattctaactccaacctcaagaataagaatgatctttttgagtataagtttgcaactggattatggacagaatggaagattgaagggcgattaccagtcgcacggtctgcccatggtgctaccgtatatgatgataaactctggatatttgcgggatatgatggaaatgcaaggttaaatgatatgtggaccattggtttacaagaccgggatctaacgtgttgggaggagattgagcagagtggagaaatccccccatcttgttgcaactttccagtcgctgtttgcagagacaaaatgtttgttttttctggccaaagtggtgcaaagatcacaaataacctgttccagtttgaattctcagaaaaagtgtggacacgcatccccactgaacatttgttacgtgggtcacccccaccaccccaaagacgttatggacacactatggtggcttttgaccgtcatctctatgtgtttgggggtgcagcagacaatactttgcctaatgagctgcactgttatgatgtggactctcagtcctgggaggtgatccagcccagcccagacagtgagttacccagtggccgcctgtttcatgctgcagctgttattgctgatgccatgtacatctttggtgggaccgttgacaataatgtcaggagtggagagatgtaccgtttccagttctcttgttacccaaagtgcactttacatgaagattatgggagactgtttgagaatcagcagttctgtgatgttgaattcatcctaggagaaaaagaggtgaggatgagaggacacactgctattgtcacagctcgctgtaaatggctgaggaagaaaatcacgcaagctagagagagacagagacaaaaattcaaacaggagcctgaggatgaaacgcagagctcccagcagaaaaccgagagtgccagcagcaaagtcaagctatcccgctcccagccaatgctagaggtcatcatccgagatgctgaagctcgcccgttcgagttacttatgcagttcctttatacagacaaaatcaagtacccaaggaagggtcatgttgaagacgttctactcattatggatgtttataaactagcactacactttaaactctcacgtcttgagcagctttgtgttcagtatattgaggccactgttgatcttcagaatgtccttggtgtatgtgaaaatgcaaataaactgcagcttgaccagttaaaggaacattgcttaaactttgtggtgaaagagtcacacttcaaccaagtaataatgatgaaagagtttgagcacttgtcatcctcactgatagtggagattgtccgtagaaagcagcagcctcctgttcgggtccattctgatcagccagttgacacaggcacttctctggtccaggatatgaaggcccatttggaaggggcagggaatgatttttgtgatattacattgctgctagatggacacccaagacctgcacataaagccatcttggctgcccgatccagctactttgaagccatgttccgttctttcatgcctgaggatggacaagtgaatatctcaattggagaaatggtgccaagcaagcaggcctttgagtccttgctaagatatatttactatggagaagtcaatatgcccccagaagactccctctacttgttctctgccccatattactatgggttcttcagtaaccgactacaagcatactgcaggcagaatctggaaatgaatgttacagtggaaaatgtacttcagattttagaagcagcagataagacccaggctctggatatgaaaaagcactgtcttcatatcatcgtccatcagttcaccaaggttgcaaagctgccgaacctgcgattactgagccaggctctgctcatcaacataatcgaatctctggccagtcacatttctgacaagcaatgtgctgagttaggctctgacatctgaagccacctccatggaccacgtgtgatgcctaaagacaaacttcgtgccattcctcgttgtcgcaagtaaatcatcttgtcgcaccacagaaaccaaaagctgctgtgagtttacgcttcatttatagtgaaggagctgagaatgcctgaatactgttgccaatctgtgcgtgaaaactccttttaggggtgccgtgcattagatctcaatactccccacatcatggtttgtacagattttgctgctgtcagtttgaactactgaatgtactctgtatcactacactaggaaatttataaagctgcctgctaatgctcttaaaggcaaagtaaaatcccatgtttttttaatgtgtatagggctacattactacttcccatgtatagctgctttgggtctgtatttgtaggccatgggtccccaaactttttttttttttacctgtgaagcacacccgaatgtaataactgttgaggagcaagaaacaagaaaaaaaatccttggagatgccaaataagggctgtgataggccaattgatagctccacgtagactgctagaatgcatgcaaataaacctgtatgtttatgcctaaaaaaaaataaaaaaaaaaaaaaaaaaaaaaaaaacaaaaaaaaaaaaaaaaaaaaagaaaaaaaaaaaaaaaaaaaaaaaaaaaaaaaaaaaaaaaa

SEQ ID NO: 217 - DNA, 1697 bp, Xenopus laevis
cggacttaggcggctttagtgtgtgcctgctcgttgtcagacctgcttcctcagagtgagtctccgggttcaacatgtcagaggaaaccgaacgctccgatggccgcattgttaagatggaggttgattataccagcaccgtggatcagcggctgcccgagtgtgagaagatggcactggaaggacgcctacaggaagtgattgagatcctcttgtctctggaaaaacagactagaacagcttctgacatggtgtcaacctcacgaatcttggtggcaatagttaagatgtgctatgaagccaaagactgggacctgctcaatgagaacattatgcttctgtccaaaaggaggagtcagctcaaacaggctgtagccaagatggtccagcagtgctgccagtacgtggaggagatcacagaccttcccatcaaactgcgcctcattgacactctccggacagttacagagggaaagatatatgtggaaattgagcgtgctcgcctaaccaaaacacttgctgctattaaggaacagagtgaagatgttacggaggctgccgccattttgcaggagctacaggtggagacctatggatccatggaaaagaaagagaaagtggaatttatactggagcagatgcgcctgtgtctggctgttaaagaccatatccgaacccaaatcattagcaagaaaataaacaccaaatttttccaagaggagaacacagagaaaccgaagctaaagtattacaacttaatgatccagctggaccaacatgagggatcttatctatcaatatgcaaacactaccgggctatctattataccccctgtatccaggctgagagtgacaaatggcaacatgccctaaagagtgtggtgctgtacatcattctgtctccttatgacaatgagcaatctgacctggtccataggatcagcactgataaaaaactggaagatattccaaagtacaaggatttgctgaaacttttcactacaatggagctgatgcgttggagcatgctggtagaggattatgggaaagagctgagggaaggctcccttgacagcacagccactgatgtgttttcctacacagaggagggggaaaagcgatggaaagatctaaagaaccgtgtggtggaacataatataaggataatggctaaatattatactaggattactatgaagcggatggcccaactgctagacctctctgtaaatgagtctgaggagttcctttccagtctagttgttaacaagactatatatgctaaagtagacaggttggctggaattataaacttccagagaccaaaggaccccaatgatctgctcaatgactggtcccagaaactgaactccttgatggctttggtaaacaagacgacacatctcatagctaaagaggagatgatccacaatctgcagtgagccatggctgttttatttaatgtggctcaataatagcgtggcccagcagtacacgcacttccacatagagcattcacattgttcagtctgtttgctggtggagagcctgtgctgcactgcagggcagtaatgaaattagctttgggttggtcaactgtataatatattttttatgttcctttctaagtgtaacaatatggaatggctttttgtgttgtaataaaatacaaattgcgttgtaaaaaaaaaaaaaaa

SEQ ID NO: 218 - DNA, 2463 bp, Xenopus laevis
cgcccggggattcaaaacggaggagcgcgggatcggcggagcttggggacatgtgcacatgagaatattctgtactcgttcaaataaatagctcccccgcaccagccatggaggagggatataaggaaaactgtgggttaaatgtaaatccgatgggaaccaggtcgcccccaaagcagctcacgtctgccacctccgtgttaggggagatccagcttgcggccaccaatttaaagacccctacaaagcctcaggaatggaacaatgccgacccctggaccccgacggccaatctcaaaatgctgattagcgctgccagccccgaaatcaggaaccgggagcgagagatcttggaggagcagttttctggggacgaactggaaaaggtgctgccgagccgcaaggagaagagtttggggttactgtgccataagttcctggcgcgatatcccagttaccccaatcccgctgtgaataacagtatctgtctggatgaagtcgccggggagctgagtgtcgagcgccggcgcatttacgacattgtcaacgtgctggagagtctccacatggtcagtcgcttggccaaaaacaaatacatttggcacggccgcctcaatctcggcaaaacgtttgaagcgctgaaaaaggtcggagaggggaatcaatacggggagcagattcagctgctgaagaaacgagaacaggacgagtttgattcccagaattcccctaatccagaaacgccaaaaccccttgttaagcacccggaagttgggtttgtggagctccctggtttggagttcagagcagcgtcggtgaacagtaggaaagagaagtccctgcgagtgatgagtcagcggtttgtgatgctgtttcttgtgtcggcccctcggatcgtcagcttagaagttgctgctaaaatattaattggagaggatcaactggaggatttagacaaaagcaaatttaaaacaaagatcaggcgcctgtatgatatcgctaatgtcctgacgagtctgaatctcataaagaaagtccatgtgacagaggagaaggggaggaagcccgccttccagtggaccggccccgagtcgtttacagacgatcaagactcagagaacaggtccagcccaactgcactcacccccgtggccattgacctgaggtccccaaaggaaaactgcgccaaaaacctcttcgcttccggaggcaagacttttactcgccatcagtctcttataaaactcgccaaaagcatcgaaaatgaccggcggaagataaactcagctccctccagccccataaagactggcgacggatcctccagtgcagcttccaagatggcgcagctcgcagcgatatgtaagaagcagctccagcagtgcagggatcagactaaagtgaagctgaaggtttctacttgcaaagtaaaatccaccttgaaacaaccggggggctccgataagaaccagaccccacgctgtctgagcccaacctactgccaggccttcccactgctccagcatcaccccaatactgctcccccctacgctgtcattctgcagcccccccacacacaaactctctccgatgttcctcccactctcggctacacaaacccaagtgacctgcaggcgccatcagacggggacgatcaatcgacccaggagcggggccccaaacggcaacatgagaccgacagaggctgcacctcaaagaggatcaaaggttctgtggtcgatgatgtcacagagactctctatccgtctgggtatctaattcccttacaatttgccccggtggcccctgagtccagtaaggagaatgcgggcccctcctcggagaacaagttctttacttccccagtttcaggagttttccctctcaagctcatgttctctccggggccagtaaccgccgtgccagttgtaagccgcactagccacaacatgggaggtgggtcgggtccctctaagagccccagcccgggaatgttcacgttcgccctacagaacagagagctgatatcatcaggacacccccaaactgctaccgtgtccccccggaatgggaagggcccagaggagctgaactgtaaacatgtctctcctgtgacctatcacgggcagccatttacagtgtttgccctgccccagtcggcccttcctgtgacccccaaaggatttcactcgctgcaggaaaatttcttccgtaccccggggggcatgagctgctcacccccagaatctgcaagaaaactggatgttggtaccgacgattaaccaaagccaatctggaaatgtaggacgagacagggggagggtctttgtcactttgctgcaggactacaactcccagcatccccggtgtgccaaaggaacacctagtcacttctgtagaactttttttattttttttttctagaatatttttggcataaaaaaaaaaaaaaaaaaaaaaaaa

SEQ ID NO: 219 - DNA, 1896 bp, Xenopus laevis
gtgtcggtgagtgtttcccctgcaccccgccggcggcatgtggaggttccacgttgtgaggagctcccggtgacggaagggggcgctgcaagcagattccagcactgaatatgggtgaaaagaagccagaaacgctggattttgtgaaagacttccaggaatatctcactcagcagacacaccacgtcaacatgatctctggctctgtgagcagtgacaaagaagctgaaactttacaaggagggactcagaaccacgatgcactctccgctaattctccgtgccttgctctaccggcagctgcgactgacagcgatcagaatgggctggaccatccctccgtggaggtgtctctggatgaaagcgctgggatgctggtggacggctttgagcggacctttgacggcaaacttaaatgtcgctattgcaactatgccagcaaaggaacagcccgtctgatcgagcatatccgtatacacacaggtgagaagccacaccgttgccacttatgcccatttgcatcggcctacgagcgccacctagaggctcacatgcgctcgcacaccggggagaagccatacaagtgtgagctgtgttccttccgctgcagcgatcgaagcaacctctctcatcaccgccggcgcaaacacaagatgctgccaatcaaaggcacccggccatccctcggcaataagaaaatgtggggggtccttcagaagaaagttagcagcctgggttacacccgccggactctcattaatctcagtccgccttccatggtggtgcacaaagcagactatctcagcgacttcgcccatgagattcccagcatccagagcgaggcttatgaacacttggccaaggcctcacattcagtgggtctctctcgggatccccaagagctcatggtggacaaccccttaaaccagctgtccactttggcagggcaactctctagccttccaccggacactcagaatcctgcttccccagacaccgggccctgtcctgatgaaaaaccctttatgatccagcagcctccacctccagcctgtagctcagctgtctccaccagtgtagctcagagttcctcacctgccagccctgaagggcgtccgagccacaatcacaggaactgtagccctatggcggggccaagtagtgagcgtagtgggcgcaccagcacccctagcattagcaacagccaacccagcacccctgcacccgcccttccagtccaggaccctcagctcctgcaccactgccagcactgtgacatgtactttgcagacaacatattatacaccatccacatgggctgccatggctttgaaaatccttttcagtgcaacatttgtggttgcaagtgcaaaaacaagtatgactttgcctgccattttgctcgaggtgcctgctgtcaacactcatcacgatgtgcatttaggaggaccgacgatcatgtgacgaaataacgatattgcgttggtctcttccgtctttgtatttgtactgttgaatggagagagtgtttctggatgtgttcgtgaagacccaaataggtaacatcatggcaaggactttattgttttattccttttttttttttttttatttggatcatgcatctaattttgtacacgactttatggccacaagctgaagggcacgagaatgaactcaccagatgtctaacttttaaggttacgaaacccaatgtacgtctacttatttctccaaactgggtgttcggaaaagattttatcactgtgtgttaattatttctccaaagattctaatgttccatgaactgtcactgagtctaataaatctgtattgtctattcacataaaaaaaaaaaaaaaaaaaaaaaaaaaaaaaaaaaaaaaaaaaaaaaaa

SEQ ID NO: 220 - DNA, 1521 bp, Xenopus laevis
aagtttggaagacagaggtttccaacaacataatggcagagggccttcctaatgatgccaagggggcagtgttgatgcccagcgactccctgccagagggctctgttcaggtcagaggatatgactttaatcgtggaatcaactatgaagctttgttgcagagctacttgaccacaggcttccaggccacacactttggccaagcggccaaggagatcaacaacatgatagaggctaagctggcatctcctggaggctgcaccatctttctcgggtacacatcgaacctgatcagctctggagtacgagaaacaatacggtacctggtagagcacagaatggtggatatcttagtcacaacagctgggggtattgaagaggacctgattaaatgtctggcaccgacttacctgggagactttagcctgaagggggcagacctgaggcctcggggaattaaccggatcgggaatctcttggttcccaacaataattactgtttatttgaggactgggtcaccccgatactggatcagatggtgttggagcaagacacagagggcaccaagtggactccctccaagatgattgcacgtctaggaaaggagatcaatcacccagactctgtgtattactgggcctataagaacaacatcccagtattcagccctgctctgacggatggatcactcggagacatgttgtattttcactcatacaaaaatcctggcctcaagctggacattgtggaggatattcgcaagttaaactcccaagtaatctttgcgaagaagacaggaatgattattttgggtggcggccttatcaagcaccacatttgcaatgctaacctcatgaggaacggcgcagattatgcagtttttgttaatacagctcaggagtttgatggctcagatgctggtgcgaggccggatgaagctgtatcgtggggcaaaattcgtatggaagcgaaacctgtcaagatctatgccgatgcctccctggtgttccccttacttgtggctcagacttttgcacagaaacaggcagatttcccggctaaaaagcaagaacaggactgacaccctatggccttggatctatgcatgcccgtgccttctgtcttggcattcccctgcttgtcagtccatacaagttatccatgtgctgccctgaggcaacaaaccaccacatcttctgagttctggagccagtaagcttacatttgtaggatgtgtgtacattagtatgagtgcaataatagatgtaccgtataaggttcagttgtacataagcatgctaatgtaggagggtaattatttaatccgctgggttagtggggtactcctacatggtttttggttttgtcatttgtattttatggtgtatatttaagttttctctttgtcaagaagaaggttcgttcaacctagagacccaactgtcaactcagagatcaagggttaaaataataaaagtagtacttccaaaaaaaaaaaaaaaaaaaaaaaaaaaaaaaaa

SEQ ID NO: 221 - DNA, 3493 bp, Xenopus laevis
cggacgcgtgggcggggacgcgctaatagttagagcgggcgcgctagtattccaacacaacctatccggctgagcagcggtgagaggcccggcgctcccatcatggctgacaacgacaaactggacaaccagcggctgaagaatttcaagaacaaaggccgcgacctggagagcatgagaagacagaggaatgaagttgttgtggaactgagaaagaataagagagatgagcatttgctgaaaagaagaaatgttccccatgaagatatttgtgaagattctgacgctgatgcagatttcagagtgcaaaatacttcactggaagccattgtacagaatgcatcaagtgatcatcaaggcatacagctcagtgctgtgcaagctgcaagaaagctcctttctagtgaccgtaatccaccaattgatgacttgataaaatctggaattttacccattttggttcattgcctggatagagatgataatccatctcttcagtttgaagctgcgtgggctttgacaaacattgcatccggaacatctgaacaaacacaagctgtggttcagtcaaatgctgtgccactgttcttaagattattgcattctccccatcaaaatgtctgtgagcaggcagtctgggcactggggaatattataggtgatggacctcagtgcagagattatgtgatcagccttggtgttgttaaacctttgctgtcttttatcaatccatccattcccattacattcctaagaaacgttacctgggtaatggtcaatttgtgtcgtcataaagatccaccaccacctatggagaccattcaagagattcttcccgcactctgtgtgcttatacaccatacagatgtaaatatattggtcgacactgtttgggccctctcctatctgacagatgctggtaatgaacaaattcagatggtgatagaatctggaatagtgacaaacttggttcctcttctaagcaacccagaagttaaagtacagactgctgctttgagagctgttggtaacattgttactggaactgacgaacagacccaggttgttctaaactgtgaggcgctattacattttccatcactgctgacacatgccaaggaaaaaattaataaggaggcggtatggttcttatccaatatcacagcaggcaaccagcagcaagttcaggcagtaatcgatgctaaccttgtgcctatgatcatacacttgttggataagggtgattttggaacccagaaggaggctgcttgggctataagcaatttaacaatcagtggaagaaaagatcaagttgcatatcttatccaacaaaacgtcatccctccgttctgcaacctactcaccgtcaaagatccgcaagtcattcaagttgtgttggatggattaagcaacattttaaaaatggctgatgaggattctgaaactatagccaatcttattgaagagtgtggaggcctggaaaagatagaacaactgcaaagccacgagaatgaagatatctacaaactggcatttgaaataattgatcaatttttctcatcagatattgatgaagattctagccttgtcccagaaacaatacagggaggaacattcggcttcaattcatctgccaacgtaccagctgaagggttccagttttaggaggaatggttggaagcgaggtacattgcagcactgaaaactggtttgatccatcaagcttggctcatgggatctgctgcattaaattggagaaagatgtgaggacttcatttggatgacagtgtagagcaaatgaagtcaagatggcgagtggatgtgagtgagagtgagtggcaaatgtaataaacacttcacaccaaatgcttatataggttgtgcagaggaaaagggctacaggtcatagatcttcagtgggaacattgacctgaaagagaaatgcagtactatcatcatcaagccttgtaagcataaaaagaaacacatgggtaggatgcccgcataagtccaaggagattaagcccaggccttgcttagaagctccgtatgaatggacagcattgaatgaatgtctggacacccagttgtgaatccaggctcatttttttctgaacgtgaggctattcactcatgatgcagactcccagtcctggagtggcgtgtgtacgagagtatgggtgtggtgctgtatgtgaacgcatgcaagcttgaatcgccttcaacgggttgactcaacctagataatcacaaaaagaatcagaagtgttaccttacactggacattaaaacaaagacatgtttagcagcagattttgggttatttctcagccaatttgctttcttttactttatttttctttaccttttttttttttttcctttttaacttcagtttgtacggcttgtatatatttttttttttttctcctgcgcataaaagaaggaaatttaagaaggcaacgctgtgcatttgcaccagatgaatgtgttccgcaaaaatgttccatatcatcagagctgattcgtgtacaaaattctgcctggaacccaggactgcccctaaatctaaaagactgttttttccagtacaagatgccatatgagaggagacgagtagagagaggatacaatgtggggttctgcagccattcattttcagagataacatcgttactttgcatgtttaatttttagctacgtttctgttgagtcctgtacagatgtttcagttgtggtagaaactgtgcggtgtttcattactttgcttttgttttttttcttcaacttttttgttttctatgaaaatgatatggaaaggtctaatttcaaaatgggtgcatatgtactgctacattcagattgtcaggaggcgtgactagatatgtacagatctatttgtgctttcaacacctttactatgcctaagcagttccattgttttagaatctttttatctttagatgtaaggcaagccatgaacaatctattttgagccactttagggagataaatgagtattttaaaacttgcattctctgcatgcaagtctctcttttatttggagaactgcctctgcctggggtactgcacactaaattcaaagctgcatcgattatgttgtattaagagaactctttataaggtggctcattgtaggaaatgctgtgccttccccttgagcacaagtgttgcatgaacaacaatttgctgttattccgacatgcaaggttagccaccattagcctagatatatctactttgtgtttaaatggtaattctcaaacactgtagactggataaagattattttgtgatcataatttgttggatttagagtatttttgcagcagtccttgtcatctgaagtatggcttaaggttacaattagaaatggctactagcttgtacatttatttatgtagaaggcaagctaggctgtcatggggaataaataataaaccttaagaaacttaaaaaaaaaaaaaaaaaa

SEQ ID NO: 222 - DNA, 2639 bp, Xenopus laevis
tgggaaagttttaggctgttgcgagcagttcgtgctggggagacgatttggcattaggaagcgtgaaagaaaaagagacatttaatagccatagtacccttgaatgaaactcgcacctcttgaggaaatgcctgctgtctgtgagtctttgctggatgacattgaagatatggtctccgctacggacccaaagcctcatgatcgccagtctgctagaaaaaacatagtacccagagcacggaaaagaaataaaaacaacattcaagaggaagaaccccctgctgatagcacaataccaggcactcagaagatctggatccgtacatggggctgctcacataataactccgatggtgaatatatggcggggcagctggctgcatatggctacagtataaccgaacagcctgagaaagcagatttgtggctgctaaacagttgcactgtgaagagtccagctgaggaccacttcaggaactccattaagaaagcccaagaagcaaataaaaaagttgtagtgtctggatgtgttccccaagcacaaccacgtcaagactacatgaaggggctgagtatcataggggtgcagcaaatagacagagtggttgaagttgtagaagaaacaattaaaggtcattctgtgagattgctgggtcagaaaaaggataatggaaaacggttggggggagctcgattggatttgccaaagatcaggaagaacccactgatagaaatcatttccatcaatacagggtgtttgaatgcttgtacatactgtaaaaccaaacatgcaagaggagaacttgccagttacccagttgaagaattggttgacagagccacgcagtctttccaagagggtgtctgcgagatctggctgaccagcgaagacactggagcttatggcagagacattgggacagatctcccaacgctcttatggaagctggttgaagttatccctgagggcgccatgctgaggctaggcatgaccaaccccccttatatattagagcacctggaggaaatggcaaagatcctaaatcatccgcgagtgtatgcattcttgcatattcctgtacaatctgcttcagacagtgtgctcatggacatgaagagagaatactgcatcgcagacttcaaacgagtggtggattttcttaaagaaagagtgcccggaattacaattgctacggacatcatttgtggctttccaggagaaacagatgaagattttaaggagacgttaaaattggttgaggagtacaaattccccagtctcttcattaatcagttttacccacgccctgggaccccagctgctaaaatggagcaagttctagctcatgtgaaaaagcggaggaccaaggagctgtcccaactctttcattcatacgatccctacgatcacaagattgggcagaagcaacaagttttggtgacagaagagtcctttgattcccagtattatgttgctcacaatcgtttctacgaacaggttcttgtacctaaggatcctgatttcatggggaaaatggttgaagtgaagatttttgaagcagggaaacattttatgaagggacagccagttcaagattcttacatctatactccatccatcactaagcctctcgcaaaaggagaagtttctggattaaccgaggagttgaagccaccaaacaacattcccaaatccgagacccttctggagaaacactgggagcgactgcaagtcttccttttcctcactgctctgctggctgctgtcattgcttttgttggaactaaattagtttaaaaagcaaattgtttggggagcagtttacaattggaatttcttaccatcatttaattggcttttaagtctctctatttttatatcagaacatatatcccaaacttcaaaagattttttttttctaaagcaaatattcttcagttcctgtctaggagtatgtaatgcagttatttgtgaacacctacgcggcggttgtgttgctagactctccactttcccagcctcctttttaggaatttcatactgagatcttcagccttagttctgtgatacttgtaaatacaagcgtcggtgccagatgcagtgacctggcttcatcctgatgaaagaaacacagggggaaaggtcaagtctattaatagtatgcttccaatgaaaatgcaaaaagtattttgcttcttttttttaatttatatcaatgtgattgtgcagatgagcagtcctactgtcaaattctttccagccaagtgagaaatgaaggcaaatatttctattcaaaagcagaaaagtcaaatactgatttaatttattctcatcgaaatgtgtcgctcctcactgtgtctgactgcttcacatacaggtcaatttgattggataattgtgcgccgtttcgttttaggtagggagcagtgatgtgcactcttatttcctgcagataattaaagtctgccgaccgcaaccagtaattgtgcatgtgtgtgtgtttgaaaatgcattaagttattccgaaacatttttctcattttttgctttaccgggattatttgtttttattgagatgagagcaagatgctttattaaacattatctacactgagaaaaaaaaaaaaaaaaaaaaaaa

SEQ ID NO: 223 - DNA, 2200 bp, Xenopus laevis
cgctcacgtgacccctcgggccggccgcagaatggtgcctggagaaaatggcggacaccgaagagctgcggaatatgatatcaagctttcgagtttcagaacttcaagtgcttttggggtttgctgggcgaaacaaaagtgggcgcaagcacgaccttctaatgagggccctccatttattaaagaatggctgcagccccgctgtgcagattaaaatcaaagagctctactgccggcgctttcccaggaccctcgacggagtgtcgggattatcacccatcagatcgaacgtattcaatctagacagcagctccccggtggattcagacctgacggttggtgggattcactccctgccttcctcctctgtttcaccttgctcccccgcatcccctctggggtctgtcctgctgcaggacaccaaagctccgtttgagattcagcagctgtcccccccaattcctcccgtgcacccagatgtccatctcaagactcttcctttttacgatgtgctcgatgttctcgttaaacccacaagcttagtgcagaacagtctccaaagatttcaagagaaattttttatctttgcattgacccctcaacaggtgcgagaaattgtcatctccagagattacatgccaggcggcagaagagattactcagtccaggtccagctaaggttatgtttagcagagactagctgtcctcaagaggataactatccgagcagcctgtgcattaaagttaatgggaagctgtttcctttgccgggatgcgctgtgccaccaaaaaatggcgttgaacagaaacgacctggtcgccccctcaacattacctcattagttcggctgtcgtctgcagttccaaaccaggtctccatttcgtgggcttctgaaatcgggaagaattactccatgtctgtctacctggtgcgccagttgacatcggcggtgctgctccaaaagctgaagctgaagggaattaggaatccagaccattccagggcacttataaaagagaaactcactgcagatccagacagtgaaattgctaccaccagcctgagggtctctctgatgtgccctcttggaaaaatgaggctgagcattccttgcagagccgtcacctgctctcacttgcagtgctttgacgctgctctttatctgcaaatgaatgagaagaagccgacgtggatctgtcccgtgtgcgacaaaaaggctacctatgaaagccttattattgatgggctctttatggagatccttaaccagtgctctgatgtggatgagatcaagttccagcaggatggctcttggtgtcccatgaggcctaagaaggagccaatgacttctccaaacacacagtatccccacattgaagggacaggtgttatcagcaaaatctgttctgcaatagaaggcggcgagacaaccagaaagaataaagctgaagtcatagatctgacgattgaaagttcatcggatgatgacgagccgcctgcgaagaaggaatgtgtgtacatgacagaatcgcaggaggcggctatgaaaggggtcttgtcgtatcagccgtcatcaataagagttggaaaagtaaccggtattgagtcagactccattcatccctcaatggcagagtacgcggatcatttccatcacccggccatcgctggaatatcagcagacttaccaggtctggattttctctctctcgtttcaatggatcctcagtactatccccctatgtttttggatagtctcatctcgccaatgccaacaagccaaataactggcaaaccctgaacctggagcagccgccatgaaagtgtccagcgaggagaatgtcttgccgctgagcctgagctcttctagagattttcagcacatccagaggaatgaccgcaatgctcttgaacaacaacacccccttatttatttgttaaactccccagagtgcaggaagagactcggtggagaaaaggacaaacttttttttttttattattattattattggtgaactgaaccaagcacgcaaattgaaatggcacgattcccgggtcactccggatctgcacttttgtttgatgtttttgccggatgcatatgcacaggtctgtaaatactttgctcttctacccagaaggaaaatgtatatatgtatttttataaataaagcccagatcaaaaaaaaaaaaaaa

SEQ ID NO: 224 - DNA, 610 bp, Xenopus laevis
tgtcccgggagtgctgctggaggtcggaactgaaggaaagaacataaccatggccacgcgcagagctgcactcaaagcaatcgactggatggcgtttgccgagagggtcccaccaaatcaaaaggcgatgttcaatgccctcaagactagaagcgacacagtcgctggaaaattagcctcccttccagagaagcctccaaccattgactgggccttctaccgtgttgcagttcagaaagctggtatggtcgatgagtttgagaagaagtttagctccatcactgtccctgtgccaaaggatacccagactgagaagattaacttacaggaacaagagtctgttaaactagctgaatcctacatccaggaatccaagacccgggtgtctcagtatgaaaaagagctagagaggtacaaaaacatgatcccttttgatcagatgacctttgaggatcttcatgaagctttccctgaaaccaagctggacaaagagaagcatccatactggccacacaagccaatcagtgaactgtaaaatgtttgaccacataactatccttctaattaataaaacagagagcgtattaataacttgaaaaaaaaaaaaaaa

SEQ ID NO: 225 - DNA, 728 bp, Xenopus laevis
atagcattcagatctctagtagcgaataaagcgttaaaagttatggcaaaagccaaggatgtgttaatggttgtggcgaaggtggtgatgatcatcacctgcctctacttcttcatctgttccctctccttcttgtcagattcattcagattgcttggaggaaggaatcttggagctctgttcgcaaactctgagctgttgaacaaccccgtggtgggggtgatgataggtgtccttgtgacggtcctggtccaatctagttctacctccaccacaatcattgttggtttggtggcagcagatgtcccggtcaagacagccatccccatgatcatgggcgctaacattggcacctcagtcaccaacaccttcgtctccttcacccaaatgtctgacagggaggagttcagaagagcctttgcctgtgcaacagtccacgacatgttcaactggctgtctgtgatcaccctggtgaccgtggaagtgtgtaccgggtacttggagaagatgacaggagctatggtggccaccttgggagataccaagggttcctccaagccaccagatttcctgaaagttttgacgaaaccattcacaaagtcaataatccaactgaacaagaaggtgctctcaggatgggccagaaatgacccaaagtatgaaaattcaccacagttctgaaaactggttgtggagatgattcaactgtctgtcctttccttttgcta

SEQ ID NO: 226 - DNA, 1507 bp, Xenopus laevis
gacggaggtgacaggcagcagcagccatgcctctttttacatccaacccgtttgatcctgatgtagagaaagcaactagcgaactcaacacggccgaggactggggacttatcctggatctttgtgataaagtcggtcagtcacgaacaggacctaaagactgtctgcggtccataatgaggagagtgaaccataaagatccccatgtggcaatgcaagcacttactttactcggagcctgcgtgtcaaactgtggaaagatctttcacttagaagtatgctccagagattttgcaagtgaagttagcagtgttttaaataagggacatccaaaggtatgcgagaagttaaaagctctgatggtcgaatgggctgaagagttcaaaaatgatcctcaactgagtttaatatcggctatgataaagaatctcaaggagcagggagtcactttccctgcagttggctcccaggctgcagagcaagcaaaggccagtccagcattagtaactaaggaccctggaacagtagctattaagaaagaagaagaggatcttgcaaaagcaatagaattatcactaaaggagcaaaagcaacaaagcaccgtttcgggtctatatcccagcaccagcctgttgaccgcacttaaacctgaggggagaaaagtgcaggctatttatgactttgaggctgctgaggataatgaattgacttttaaggcaggtgacatagttacggtgctggatgacagtgaccccaactggtggaaaggcgaaacgaacgaaggaactggactctttccctctaattttgtcacagccgacctttctgctgagctggagattataaaaacagataagaaaactgtgcagttcagtgatgaagttcaagtagagacaattgagccggaacctgagccagtttacattgatgaggataaaatggatcacttactacaaatgcttcagagtgcagatccaacggatggtttgccagaccctgcagatttacttcacctggaagccgcttgccatcagatgggacccttaatagatgaaaaacttgaagacattgacaggaaacactctgaactctcagagttaaatgttaaagtaatggaagcactctccttctataccaagttaatgaatgaggaccccatgtattctatgtatgcgaagatgcagaaccaacagttttacatgcagtcagctgctgtcccgcctcaacagtcctatcagggcccccatccgaacgctgcctatattgttacagggaacactcagatgggtcacattcagacctacccagtcccagcagaacaacttccttctctaaatcagggagccgttccacaccctgcaagctctgagctgcccagccaatcccagcaagcttcttataagtaattcctacagtgatcagttctaaaaaaaaaaaaagaaaaaaaaaaaaaaaaaaaaaaaaaaaaaaaaaaaaaaaaaaaaaaaaaaaaaaaaaaaaaaaaaaa

SEQ ID NO: 227 - DNA, 1375 bp, Xenopus laevis
aacgaggcagaggaaccaggggaaaaagaagcagaaacatgtacggtcacttcaacaagggcccggcctatggactcagcgctgaggttaagaacaagttggctcagaagtatgatcctctgaaggaggcggagctgagacaatggatagatggcctgacaggaagaactattgggaacaatttcatggattctttgaaagatggaatcatcctctgcgagctcatcaacaagctccagccgggctctgtacggaagatcaacgaggcgactcagaactggcataagctggaaaacatcggaaattttatcaaaggcatcatgcaatatggagtgaaaccccatgatatatttgaggcaaatgatctttttgagaacaccaatttaactcaagtgcaatgtactctgctggcactggctagtgtggccaagtcaaaaggtgccagagtggatattggagtaaaatacgctgatcgccaggaaaggagattcaacccggacaaacttaaggagggaaggaatataatcgggctccagatgggaacaaacaagtttgccagccagaaagggatgacctcttatggtactcgtaggcacctctatgaccccaaactggctaatgaacaaccaatggatcaggcaacaatcagcctgcaaatgggcaccaataaaggagcttcccaggctggcatgacagcaccaggtaccaaacgccagatctttgaccaaaagcttggcatggaacattgtgactcccagaccgtctccttgcaaatgggatcaaacaagggcgcttctcagcacggcatgactgtgtatggattgccccgccaagtttacgactccaagtactgcaacgtgcccgaattcctaatggaaggagatgaagacggccaatacaataacagccaccagtattacaactctgagtaacaccccggcctctttgtaacaaacccctgcccactccccttctgtgccagtgtgtgtttgctactgtggcaaaaaaacgtgcttgttggtctggcaaagtggcaaactgccaactacatatgcccactacagatatagaaaggcattgatgctacccattgtgtgccaggctaggatactaccttggcagagaatgggcaatatttaatgtgtgccagggtttactctcccctgtatcaaagaaaagtgccatatttctggcatgcctcttctgtgtcggcacttacccactcttttgggctggtgtccgtgtcgtttactccacacgcttatctggtcaaaggggaactccacaaaaacataacttaagctttttgaaaagtaaacataatttcaagcaactatgcaatatacatcaattaaaaatgaaaaaaaaaaaaaaa

SEQ ID NO: 228 - DNA, 5855 bp, Xenopus laevis
aggagctggaaattaacggcgttgcgggacgtttaagcagcgatccgggactgcgggctgttttaagaaaatcggaactgtcacgcgaaaagcgccattgttgggcgaaatggagaatccagaggcttccgatgggtgacacgcagggtgacaaatgtgccatggcatcatcaccggcactaagacaaccaacaccaggaaaggatgtgggagcaaagtagggcatgtagcccttaaaattcacacatctggtttgtcatgaatggctaaaccaagaagtcacctgatgtgctgatatcatgggaagctgctgcagttgccgagatggtctcccagacaatcatcccacaaaatttaaggtcaccaatgtggatgatgagggaacagagttgggttcaggggtcatggaactaacacaaactgaacttgtccttcacacccgaaagcgtgatgctgtgagatggccatacctctgtttacggcgttatggatatgactctaacctcttttcctttgaaagtgggagaaggtgccagactggtcaagggatctttgcgttcaagtgctcaagagcagaagaaatcttcaacttgctgcaggagctaatgcagcgaaacagcatcagtgttgtggaagagcctgtaattattaccagaactggtcaccctggggagatggatctattgcgtaccccgcaggccccaggaggtttggggtatacagggttccccaatggattccatagtttttctcatgatgggcccaactacccatctgctcgtcatccgtcaatgggaacagtaagacatccttctgttggggaggaggcaggtcatcgcttgatgacaccggaggatcagtctcacacatatgtgaatacagccagtggaggggaagaagaagtgggaagccgtcattgtatgcattccttgcctgaggcgcatgcgccataccatgacccaccaagacacaggcttggtccaagctgttccatggaagaaaggaacccccaggtgtatcttcaaccaggagaagtaaagtttgttctgggaccagctcctgcttataggcgaatgccaatgaggggagacagcttctgtcaacatcacagggattgccagggccatatttgcagtgttgagagagagcctttgccacttcataacaataataatgagtgtaaagatcagtggcgcacacaaaagtgtgcctatgagaacatcaatggcttaatgccaccaggaagtatagctctacgacgggggggcaccaataggggcctgaaactgtcagccgatggagtaccctttagcagctgctctcatcggaggacagcaatgctacattatgagaatctgccaccactcccacctgtgtgggagtgccagtctctgcaccaggatgaagaggaggaggatgatgaagaggaggactcagctgatgctatgacaccttcactcaatagctaccatgatgatcctgtgcaaaactacatgaatgctgagagaacaacagcatgtggaggttaccaccaccatcaccggccagactgccaaccccggcgtagctgcccatcgaatgtgtttaactttgacttccgaagaccacataatgagcagaggcaacttaactacattcaggtggaactagaagggaagaatgaagggaaagcaggtccaatcccacagatcacttgcaccctggctccgaatcaccaagtccgccgtgctgactcttatgctgttatcgacctgaaaaagacagcagccatgtctagcctgcagagagcactgccacgggatgatggcacctcaagaaaaaccagacacaacagtacagacttgcctctgtaacagcggtgtatccattgctctctttgcctttatcttttcaaaagccatctgtgctgctttattttggcttttctctcttcttgtgtgcgtgcatcctggtcttttgtatcccactacttctacgtatataacatcactcctgagagaagtatttctgtttttaagaatgttaaatttagcatcttgggcaattgggacgatgttttagtaaaaacaaaagcactccttgctccagcggcgctgcaaggaccaggaaggcattaaaggtgactgtaacttcatccatctggaaatgctgttttgggtcaaatctcagtgtttttattttttttatttttacgtatttatttttttactgttgcttttgtagacttgagacattttctcatttgctgatttatttattgatttaacttatttttctatttatttttgtaaacattccatgccgttttgtgccgttggaataacactgcctagtctcgcaatgcctgacggtcgttactctcgactgatgtgcattactggttagatccttgtacctcttttgatgtcatttggacattggcatgttacaaacaattgaactgtaaatacccagttattgcattttgcagttgttatgtataggtgctaaaaataagaaaatatgaactttaaaagattatctaaattatatatctatatatacacacaaaacagaaaaacaaccaatgtaagatgtgaaggacttaacacagattataaggaagccccatattttctgtacttattacttgaattaaaagtgccaaatatttctacctgtgccatgtaaaaatttaatttatgtaattgttgtaatttgattccctttatactttgtgtatgctttacagtgctttattaaaatgtatgtaacatacacacaagaactgctgcaaggtccatctgcaatggtgcagctctgctttcttgactttacaagtctgtgctgcgtcttttgccttgttctatatatatatatatatgtatatatatatatatgtatatatatatatatatatatgtatatgtgtatgtgtgtatatatatatatatatatatatatatatatataaagtaagtgcttcttggacacttccagaagcttatacggcattatacaacatttaacagtgttggtagtatataagaagtctattgagtttcatgtcaaatgaattgggttatgaaaaaaaattgcagttaatgcttttgtgactcatttgtacagcattgtccatttgtcttgtccacttttggatatacatgcatatttacaagttgcagacactgtatgttttggaaggttgtgtatttttcatgtgcaccataaaaggaagagggtgaattctgcccatggggcactagctccgggcttctgtcagcactataccatcagcttctatgacagacaaacctaatcttctgcttgatgattgctaatgacccctaagcgtagtctttcaacaactgcccagaacatagtaagcatgtgaatgtgattaaaagttccaaggtggttacctcttatggacaactttaaagacatggggctgttaaaccctactaaaatacaaaaatagctaaatacatgtcccatgtttgcaaacgaataaagtataattggttaaccttaaagtcttcaaacaattactttttgttgtcacaccattcgatcaataggagttatgatttcctactttggtaaatcgtggttctacctttattcttgaaacaaattctgaagagttttaatactcagagaaaacaatgtgttttttccattggagactataaccttttgagtggcagctttgatggcagtgattggcaccacacattgcatggggaggacaaaagcactttaaaatgtagaatctaagcatctttctgaacacaatctctctgggaaatattttctcttaatattaaaactagtatctgtatctgcaggcagtttttacttatgcattttagtccaaagtaggtgtatagtgtggtggtaatgtattttgtgggaacaagatctagtttcagttgcatctattttgttataaattcactttttatagccgcctctaaaatagaaaaggttttgccagtgtgtgtttcaaatagatgtctcccttttttcaacaaatttgttgtatagtttaacaaatcatgtgcataactaactaaaatttgcatgaatacatacatatcctgttttcattttgctctgcaagataaactagttaagtgacttatctgtatggcagacatgcctgcatgacgtatataaaggtctttgccaaacaaaacgttagtgcacaatgcgtatcttttattataaagggactatgaatgtatacacaggtgcacagacactataataataataatgctattaatatactattttcacctacagatattcaagctatgtctaaaatgtatctctagctttgacagtgttttatttttccaactgtatatagttcaattttttccctttgagcagaatttttaagaaaaaaataatcttggttgggatcaagtacaaagttctgttttattgttacagagaaaagggaaatcttttttttttttttaaattgggttatttggttaaaatggagtttattggagacggccataattcggagctttctggataacgggtttctggataagtgatcccatacctgtagtataaccgttcacagtgcatccaaacattttatatctaggacatctgatttgttcaagaattatttaaaaaatagatgcaatttaaaaaaccattgttccatacatctgctgaaacactaatgagcttgattgggccagatacaagcatccctattttctgtaggcaatactcctacaagacaggatttgcatcttcatcacctgtgcagctttcctcactctgatgtctgaatcatccatccttagagggggattttactgtaaatgctaatagtttcgttttgatttatttattttaacttcaaagagatttaaaaagcaaagtaaggtgcattatattcctgaagctttgcatactaacaataaaattttaaggcctgatttgcaaaagtgacaaattgaatgcaattaatcatacattttaggtcttttataccctactgcatggtttacatgggctttgtattctgtaccatagcatgcaagtggtactctgcataagctgtgcttataatttgtaatgtaacttttgtaaaccaggcctaaccagaagtgaatccatcatagcatgtatatttgatcaacagcagttttgagcccatcgaaaagtatatgccattttgagactacatgtaaatagcctttgtggtgataataatacactgctaagtccagaacacaaactggatatagtaaggaatgcgtgcaatgtaatcttaatgaaagaacttttagaggaaaagcagcagaaaaatgttactacaagggttagctatgaaaacagatatgactgacagaacaagacaaagatgcaagcacaagaacttaaacatatatacagcaaatattgcttgctgaagataatgttacttcgcactgtccattgtttgcagtcacgcaatattgtaaattcatttactcttcaaataaaaatgtatcctttggttataattttcttgcagtcatgtgcattgggtaatgtcctctgggccttcccagaaaaattctgtgactctgttgtaattatctgtgattgtgtgttttagatatattgaatattactgacacaggcagagatgagatctgacactcttcctgttcaaagtccattttaaggctcactgtggaaactttttcattccattcctgtttatattcaatttatgaagtaattaatgcagagtacaactgaccagtgattttgaactaaagaaagctaatgtcttattgtgtacttggattgtataaagaataaagagatgtcgaaataaaaaaaaaaaaaaa

SEQ ID NO: 229 - DNA, 3333 bp, Xenopus laevis
gtgatggacagctagtgttcccaaccacgtttgaacccgcgctggcaagggatttcccgcagtgtgctggcggtgcggctgtgtcagaaggctggttagtctgtagcgggacgagaagaacatgacttccacacacaacttccaggggctggagtccaagccaagctcaagagtattaaaaccccctggaggtggttcaagctctatttttggtggctcagaagaaacctctgctcccagcaggcagcacaagatggcttccaacatatttgggtcacaagctgagcctgaatctgtatccaagagatctaatcctccaggtggaaagcccagcggtatattcgaggaaccaaaccctaagcaagcagcagctcgaggaaatccttcaggggcaaagggcagtgatatctttggtggtgcacaacttacaacaagccctaaagcccatcccaacaaacccaaggataacatcaatatatttgaaactgaagctccaaagaacagcactccagtgaaagctgaaccctcacctgccaaaactcagcaagagaagacccctgttgctaaggaagagaaagttgtgcttccagatccagctcttgctgcacatgagccccacctgggccctcgaccacggtctcataacagagtgctgaaccctcccgggggcaagtccagcgttgccttttattaaacgcctctgttcattgtagagacattctctctcagcacgtgtagatgacagacaggcctgctgtgtgtttattgccggcctctctctcatctatggtgacttatagctgcattatcacttggagctaagtgataatttgacaattgctacaacgcagttcatattggaagcaaaactggattctttctgaactttccctttcctcttgttcaaactcattaattgggtgaaaaataatgctgtccgtctatggttatcattcaagatatgttgctttttaagtacggttataatgctggtccttgtagcagtgtaaggggggatgattgagaaactttatagttctatatacattttatttgaataaatagaagcgggttgtggaatttgatagttatgtaggttagacccgagcaattaagacagcagaggtgaaaaatatggaggtgttattgtaaaattaactgtttataatacacaggagccatgaacatcttgtaacgtatatatatccttatggtacacaaaagccatgaatatgctgtaaattatatccttataaacggtgagttctgatgtcaacagttataaacggtgagttctgatgtcatttctgtcaaatgactcactgaaactgaaataaagtaccccctgttgcggaatgtgaggatgttggaagttaccttggagttccatgacctgtataaaaacactcggccttcggcctcgtgtttttgtatggtcatgaaactcctcggtaacttgtagtgttcttatgttttgcaagagggggtactttattcactatataaacggtgattagtgatgtcaccagttataaatggtgagtagtgatgtccttgttggaaaatacgaggatattagaagtaacctcagtgttccatgacctgtatatgatcatggaactcgtctgtgacatataatatcctcctattttacaatagggggtactttattcactatattatggcccagataaaacggatgaatttacaatattgccagtttttggaaaccagtgttttgtgctgttacatgaagaccccaaatgttacattgtatagggccctagaagaaaattgggttctgatcaaagccctgttccttcccagttaaacacatatctccatggctgccatacaatccaggcctgcacgactgaccccctaatgtttccttggaatctccgccttcttagtgattaggactggactgtattttccaccacaaacattaagtttttctttccttgtaatactccatacactttcatcttcagggtgtagttacatatcctaagcagcgttcctgccctcagtactttactttagatggcccctgatgaatgtgaaaggggaggttacgcttttgcttggctaaaaggactggaatgtaacagtttaaatatggggggtggggtgtttcctgttgaaattgtgttgaaataaaaaccctggcaggctagctgaaatgagagatgacatgtcccagatggaaccaaaaccccagtagagtccatggcattggtttcctggttaaggggaaggcaattaaatggggttgttctgtttttcactgggtgctcaggcataattctcttcttaccaaattaaaaatgtcctttttagagactgtattttattaaacattttagaaaggccaaaaactaaaatcttttgacttaaaggacaagtaaaccttaaaaataagtgaatgtcaaattgatgagggtgctattctatgcttttttgcaatgtacattcattattttatttttttaaattccaagatattaaaggatccatgtactgttaatgtgagtgtattttattacaacagcaccacctgctggtcattttcacgccattctggactccttgactgcttggtggtcggactggtgggaaaattgccagcaggtggcgcggttgtaacaaaattaattgatgttaaagtaaaactatacccctcaaacaatgtaggtctctataaaaagatattgcataaaacagctcatatgtaaaaccctgcgtcatgtaaataaaccattttcataataatatactttttagtagtatgtgccattgggtaataaatagaaaattgccatttaaaaaaaataaataaataagggccgcccccagggatcgtaggattcacggcgcacccaaacaaaccacatgttaggtcacatgagccaattaacagacagagttctgtcttttgcttccacacttcttccagttgtagtatttctggtcaggtgatctctgaggcaacacacagacaaagatggtggttcaaggcaagagatgcaaaaggacaatatttacttaaataaatggaccagtttggtaagattctttaatatgccgcttaatttgatataaacaatctgttgctgttcattttggggggtatagttttcctttaagcacccattccttgtataatgatgtacagtagggagagacaaggatggtgatttttctaaggggtccgtggacttggtgtatagttcttcttgtgatttgattatggttatgtaatgaatggttacatgttagtttgataaaaacttttatctatggaatggtttcataaaaaaaaaaaaaaaa

SEQ ID NO: 230 - DNA, 1885 bp, Xenopus laevis
ggcggcgggtggagtcgcgataggtcggtgctgagggtccctgtctggtgtgtggcaaagaaagatgagttttctgagtggtttctttggtcccatttgcgagatagaagttgtgctgaatgacgcggagaccaggaaagtttcagagattaaaactgaagaaggcaaagtagagaaacacttcttgttctatgatggcgagtcagtagctggaaaggtcaacattgtcttcaagcagcccggtaaaagattagagcatcatggaatccgcattgagtttgttggacagatcgaacttttcaatgacaaaagcaacacacatgaatttgtcaacctagtgaaggagttggccttacctggagagctgactcagagtagaaattatgattttgaatttatgcaagtggagaaaccatatgaatcgtacattgggtcgaatgtgaggctgagatatttccttaaagtgacaatagtacggcgtcttaccgatctggttaaagaatatgaccttatcgttcaccagctggctacctaccctgatgtgaataactccatcaaaatggaagttgggatagaggattgcttgcatatagaatttgaatacaacaaatcaaagtaccatttgaaagatgtcattgttggaaaaatctactttcttttggtcagaataaaaatccagcacatggagttgcagttaataaaaaaagagatcactggaataggccctagcactacgactgaaaccgaaaccgttgcaaaatatgaaatcatggatggagcaccagtcaaaggtgaatctattccgattcggctgttcatcgcagggtacgatccaacaccaacaatgagagacgtcaacaaaaagttttctgtcagatattttttaaacctggttctcgtggatgaagaagacagaagatatttcaaacaacaggagatcgtcttgtggagaaaagctcccgaaaagatcaagaaaagaaccaatttccatcaacggtttgagccccaggaaccacaagcatcagctgaagagccagagatctaattgtgcatttcctgagcagatgaaggatggaagcagaaatctaaaggccaaacctcccatcagatagtcttccttcatctggcgctgctgcataaatgtaccacactaaacactctgggggtctgtatgtaattccacatgtacatatataaatatcgagtgcttttgctgaaaaacactggacctttctcagactagcgttttataactcgtttcattttaattttcaggttatgacatggcacatgcattaagctcaaactctttcgcttcattttttctttttgttggtgcatgtcaggctggtgtaaatggaaaattaaaagcctttcccctaatactgttggtgtctgctaaacttgtttcttatatttagtttgggatttctaaaatcaggcagataataatataagttgtccccaaatccttcggtttcaccttaaaaacgaggctgttattaaacattggaagctgtgtttatgtgtggattttatctgacacttctctaagatgtttccccgcgtctgtctctatctgtatgccaaatggttacattgtcaatgttttttatataccgtgagacaaacacatttgcaacgtagctaatataaagagctgacctaatattcagagtataattaaataaggaaagattattccattttttttttatttccttggttttgttccctttcacataatggtaacatagacgattctaatttgcgatgtatataaattgctttattatattgtaaaagtattttatatacccagttttggggagagaaatactgataaaaaataaaatcttatgaaccgtaaaaaaaaaaaaaaaaa

SEQ ID NO: 231 - DNA, 3251 bp, Xenopus laevis
agaggatctctccacagctctcgtatatccccctccccatgtgctgacttctggtttcctgtgagcaaagacctgtgtgcagtgagtgcagcaatggctgcagcaaacagaaatccagttactgagctaaaggaggaactgacttgccctatttgcctggatcactttagtgaacccgtttctattgaatgtgggcacagtttctgccgaacctgcattaaccgctcctggagaggaattcacagctacttcgaatgtccccagtgtcgaaacgtatccagatggaagtttttacggcctaatcgccttgtggaaaatatggtggagataactgaacgtcttgctgcctctaaaatttctccagtcagtaagaagcaatgtgaaaagcaccaggaaccaatgaaactctattgtcaagtggacgggcgggaaatttgcttggtgtgccgagagtcagtggagcatcggacccatactgtgataccagtggaggaatctacgagagaatttaaggttcagctcagagatcgccttcaaacattaaggaaagaggcagcaaccatcattcaaacaaagtctgaggacaagcaaaaagttgagaaacttcagaaggaaattgagaaaaagcgcagaatgctggcctctgaatttgaaatcctgcgtgagattttaaatgatcgtgagagagaactcaaagatcgttttgaagtgattgagaaactgatcattcaaagaacaaatgaaaagaccagtaagctgaacgaaaagctgtcatctctccagaaactcatcatggatattgagcaaaatgtcctccctcctagtcagatatatgaggaaccaaaatctgcagtgggcagactttctcagaatctaagtgatcctcagcagaagccttcacatggtgggacaatgcctgcaacatttgccctcaagagatttactgttcctgtgaccttggaccataaaactgccaatcctaatctgattatttctggaaatcgaaaaatcgtccgatatgaggagtatccaaagaatctggtcaattatcctgaaagatttgacatgaaaccttgtgtcttaggaagcacaggataccgatcagggaaacgttactgggaagtagaagtgggcggtgggatatattggagtgttggggtcgccgcacactctgtttgcagaaaaggaccctttaagattgagcctagtggtggtatttgggccattggcttacttgggatgtacactgacagatattatgctttcaccagtcccgacatactcttgcaccccagggaccgccctgtcgtcgttggtgtatttctgaactgcgatgagcagcgcgtttcctttttcaatgccgacagctttgagcatcttcacacattcaacgacgtgcattccgctgataaaatcttccccttttttgtgttggagcaatgggaacagaactgcgacttgatatctgagtttttttgagtagaaacatgcagatttagtcagatatgaatcatagattcttctttttttataatataaatttccaccgaattttggtatttcttaattttcttacatatcctgcaatatcacgccacaaatataattgctgcataggcttgagtctggtaattggccattgttagaaaatggagctattgccatttttaataatgtcacatgttcgggctgggcctgcttcctgtatgtaggaggacagattgggaagttgtagatctacaacaggaaattatttaaaaaatttcaaatcagaggtgcaatgtgctctgtgccagttgtggctccagaacccaccaaaaaccttcagaccacaatgtttttcatattctcatgtactgtatccttactaccatgtctttgttctaatatataaataaaggataaagtgcagtaacggaactaggtgggggtgggccatgcagccaggccccccccctcgtcggtgcgcattttctttgtggctgcaaactactccagcgcaatcgatctgccggggggggtgcgggccctgttgcaccccgtgccggtagttatgccgctgatacagtggtataaacatacaaggcaaatagttgggtgatcaggaccctgcaggagttttcctggtattctagtgggttattccaagcagggttgccaggttggctggttcctagccaaattgggctactaatttaaagtccgggcaggttttgaaagtataaactagccaaggtatggatttgggctactttttggctggtttatactttggaaacagccaaagctttttctagccctaatgtgccaaacctgagtgttccaattcttgcattttccagtgattttgctcaatttcagacaattttgggacaaaaatctgctggccaccaaaatggctagaggttgaattttttaccaatatttattgacattttatatgtatttgggcctcatggggccctatacctcctgggcccccctctgtagttatgcccctggtgaaggtggcgagtatttcccattttgcttcacgaaaaaatgtgcaaatcagtaaatattgaaaaaggcgtattttcacatatatttatttattttttagacttttttttaactgcaaatgtgttattttgggctacttttgaagtgcctctcagctagttttgggctggttttgaaaattacacctggcaaccctgattccaaccctgtgtcctttctagtgcaagtgctaaaggttcttcttcccatgggcatgccaatcgtttgtacctatcccagtgcaaatcagccctattgtgtcacacggtttagcacttttaataattttaattgtttctttttcatttaacagacatagattaaggatacatgtttatcggtgtttacaccaccctgtgcaaatataattttcttaaaaacaaatggtaagaatagaaatctatttttaggaaggctggagatttttaagtatttcaaaaagcaagaagaatatttactgccattttaattagctttactaaaacatggatattattgtttgctttatgtcaggtggggaaaaggatatacagatgaactgttgggctatgaccatatttggaaaaagtacatttaattaacatgcttttgcagtttgtatttaaaagagacaccaattctgcagtataagtgtctgttattcctttcttgctggagattagaaatggatataataaaatgtattcatttcaactaaaaaaaaaaaaaaa

SEQ ID NO: 232 - DNA, 1614 bp, Xenopus laevis
cccacgcgtccggaattgtgtacctgtggttgaagtgctgaagtcttgagtgaagcaacatggcccgtaccaagcaaactgcccgtaaatcaactggtggaaaggctcctcgcaagcagttggccaccaaggcagctcgtaagagtgccccatctactggtggtgtaaagaagccacatcgttataggccaggaactgtagctcttcgtgagatccgtaggtaccagaaatccacagaactcctaatccgtaaactgcctttccagcgtctagtgagggaaattgcccaggacttcaaaactgacttgaggttccagagtgcagccattggtgctttacaggaggctagcgaagcttacttggttggtttgtttgaggatacaaatctctgtgccatccatgctaagagagtgaccatcatgcccaaggatatccagcttgcccgcagaatacggggagaacgagcatagtgcactcttgacatatggcattcttgtagtaaattctgtattctacttcttgtgaaatgtttttgtatgactggtttattatgtctccagaaccattccatctgtcactcagggtaaatccatattttgttagatgccccctattactctgaagagtagagatgacagggggtaggtgctcctagcttgttgtgcatgttttttttggttttttttttgtttaattgcccttatttctcagcttgtgactctttagaaaaacatggcaaaactatagggctgggaacaaatggtgctaaggtccagcccttagactaccatctttcttttcagaaatggccttacaggagcaccaaaaaaaggtggctttttttttttttttatcgtacagttaagagggtaagtgttctccatccccacagctcctgttgtaaactgcctgtcttaatcgtggactgttagcatgacatcacagcacaaaacacttcaccagctgtatggccacgtcttgtccttagattgttggcttgatcacacaaccttttataagtcacgtaaacgaaacttatgttttaaaaaaaaaaaaaaacccccatgagctgcccaatcacctgcctcgtgtttttgtagaccactagcaaactattctctatgctgattatctgacttattgcaaattagctggcttgctttaatgcgatagcataaaagaaatgtgggtcttaaagtctgcaataaaacccatagaaagtaacatgactatttgctagtaatttattcattgcctcactttcgatagtttttaattcaaacaggtatttatccaagcaatacaacagcattcacctggctccagatagagttggtgtgtatattgtttctatattttacactatgcaaagtaaattaagtattacaggaatgaatatggctttgctttccccattctagtatcgaaatttaccaccatggtcccttttcaaattaactatgtgggagaaagtgtttaggtgcttagcaggtaatgtgtaagccaggcagctacagctcacaaatgtttattttcaagagctattttatatatatatattgtagtgttgacgttttaaattaaatgttttacattcaaaaaaaaaaaaaaaaa

SEQ ID NO: 233 - DNA, 1748 bp, Xenopus laevis
ccagatcgaggcatgatatgcagtgagaagaggcgcatgcgcattgcatgcattattgcacgtgtatgtcagtagaatgccaaagcacaaaaattctcgtggttctacttctcgcttactccccttagctgatcagatccagcaggagggagagattagacctacggtccgaaataagcgcaagggaaaagccgcgaaagataccgaagatgatggatatgtggacgaaaaactgtcccgaaggattctggagcaggcccgtattcagcaggaggaattggaggccgaatatagtctcgggaattcggccccgaaagagaggacgactgttttagattccaaaaacaaagcagagggatcagattctgaagatgatgagtggccttcattggaaaaggcagcatctctggagaaaggtactctcaatgaggaggtacaaatcgatcctgaagatgagaaggcaattgaattgtttatgaataagaaccctccactgaggcgcactctagctgatataattatggaaaagatcacagagaagcaaaccgaggtagaaaccatgatgtctgaggtctctggacggccaatgccacaattggacccccggatactggaggtttataaaggggtaaaagaggtcctatcttcttaccgtagtggaaagctgccaaaagcttttaaaattgtccctgctctctcaaactgggagcagattctttacatcacagagccagaggcttggacagctgctgctgtgtaccaggctaccaggatattctcctctaatctggcagagcgtatggctcagcgtttttataacctggtcctgctcccccgagtgcgagatgatatagcagaatacaaacggctcaattttcatctttacatggctctcaaaaaggctctttttaaaccaggtgcctggtttaaaggtatcctaattccactttgtgaatctgggacatgctcattgcgggaggctgtgataattgggagcatcctcaccaagtgctcaataccagtcttgcactccagtgctgccatgctgaagattgcagagatggaatataatggggccaacagtatttttctgcggctgttgattgataagaaatatgccctcccctttcgtgttttggatgcacttctctttcacttcctggcatttcgttcagacaaacgaacactcccagtgctttggcaccagagtcttcttacactctgccaacgttataaagatgatatgtcttcagagcagaaagaggctttgttagacctattgcggatacattcacacccacagatatccaatgaaattcgtcgagagctagtccactccaaatcgcgagatgttgaagtggcaatggactaatgaaatggactctcaattttttggcttcatttacaatacaagttcttttgccatttgatgagtgtgaaaatggaaagaataacagtaccatgtctctgtgaattgccattagttaaaatatgtttatatatttctatattgcattggtgaaagtttttcctttgaaaaatgcttactcatacataactatgaaatatgtatttgtaacaaaatctcaagagtaatctatactgaactgaatacatattcttggatagaaacaatatctgctatgtaaattggtcacaaaatataaacatgagaataaagaattttaaaggacatatctgtcttgaaaaaaaaaaataaaaaaaaaaaaaaaaaaaaaaaaaaaaaa

SEQ ID NO: 234 - DNA, 2736 bp, Xenopus laevis
gtgtgagtgtgtgctccggagcctggcctcggcacacatttcttcttattaaaaaaattaaaaaataaaaaaaaatcacaaaatcccttggaaaaacccagaaaaatccccctttttttcttccaacgtttttattttcgttgattttaaagaaaaaaaaacacccttctttttccctcccgcgccctcgaagtgatttttaaagcttgaaaagaaaaaaaaaaaatcaacggaagaaacaccgacaaaaaaaagcaaaacaaaaaccaacctaaaaaaaaccaacaacccaaatccggtaaagagaagagtgaagtcccgcggaggagaccgaggcaacgcgtgaggcccgtcaattttgaaactgcataaaaatgaatccaagcgctcccagttaccccatggcttccctgtacgttggggaccttcatccagatgtaacggaggccatgctttacgaaaagtttagcccagctggtcccattttgtcaatccgagtttgcagagatatgattacacgacgctcactgggatatgcatatgtcaacttccagcaaccggccgatgctgagcgtgctttggatacaatgaactttgatgtgataaagggcaagcctgtgagaattatgtggtctcagcgtgacccttctctgagaaagagtggagttggtaacattttcatcaaaaacctggacaagtccattgataacaaagccctgtacgatacattttctgcgtttggcaacatcctttcctgtaaggtggtttgtgatgaaaatggatctaagggctatggctttgttcactttgagacacaagaggctgctgagagagctattgataaaatgaatggcatgcttctcaatgaccgcaaagtatttgttgggcgttttaagtcccgcaaagagcgtgaagctgagcttggcgccagagccaaggaatttacaaatgtatacattaaaaattttggagaggacatggacgatgagaggctgaaagaatggtttggccaatatggggcagctcttagtgttaaagttatgacagatgaccatggaaagtcaagaggttttggctttgtcagctttgagagacatgaagatgcacaaaaagctgtggatgatatgaatggcaaggatttgaatgggaaggccatatttgttggccgggcacagaaaaaggtggaaaggcagactgagcttaagcgcaagtttgaacaaatgaagcaggaccgaatcaccagataccagggtgttaacctctatgttaaaaaccttgatgatggtattgatgatgagcgactgcggaaagaattcacaccttttggttcaatcaccagtgctaaggtaatgatggaaggtggtcgcagtaaaggctttggttttgtttgcttttcttcccccgaagaagccactaaagcagtcacagaaatgaacggaagaattgttgccacaaagcccctgtatgttgcattggcacaaagaaaagaagagcggcaagctcacttgaccaaccagtacatgcagaggatggcaagtgtccgtgtaccaaatcctgtgatcaatccataccagcctccaccatccagctatttcatggcagctatcccaccggctcaaaaccgtgctgcgtactacccacctgggcaaattgcccaacttaggcccagcccccgttggactgcacaaggtgccagacctcatccattccagaacatggccggagcaatccgtcctagtgctcccagaccaccaacattcagtacaatgagaccgacttctcaggtcccacgtgtgatgtcagctcaacgtgttgccaatacatcaacccagactatgggtcctcggccaacaactgctgctgcagctgcaacttctgccgtcaggactgttcctcagtataaatatgcagctggtgtacggaatactcagcaacatcttaatacacagccccaagtggctatgcagcagcctgctgtccatgtacaaggccaggagcctctgacggcgtccatgctggcagctgccccacctcaggagcagaaacaaatgctgggtgagaggctcttcccacttatccaagcaatgcacccaactctggctggcaagattactggaatgttactggagattgacaactccgagcttctccatatgctcgagtcacccgagtctctgcgctccaaggttgatgaagctgttgctgtgctgcaagcccatcaggctaaagaagccgctcagaaggtcgttagtgcaactggagtgccaactgcttaagatgcatgcatatgggaacttcagggaacttcacttcaccagagaaatcaaaaacattgaaaaatggaaatgttgcaaaaacagtgcaaaacataaaatcaaataaaaaaggaaaggaaacgttaatggctgcgtacagagcaaatgccagggccggcacaacatttgctggtcctagatatttaaataaaaaaaaatgtacaaaaaaatagcaaaatataaaactgaaactaattttttttttcgtttttaaacccggggaaaggcattttgaacacagtacgagaagttaagcattcctttctttgattttgtaattctttactgtggaaaagctcagaatttcacttgtgggaaatgagcacagaaacataatttggattataaaagtcttgctttaataaaaattacttaaaacattaaaaaaaaaaaaaaaaaaaaaaaaaaaaaaaaaaaaaaa

SEQ ID NO: 235 - DNA, 4123 bp, Xenopus laevis
ctcgtaatgcctgcgtttggccaggccacagcaccggcttcttcagttcccactgaccctgtgtattagaataaagccccaattaacacctgccctggacgcacagacatttctatacatcggccctaaaagtcgttatgagaactttttggtaaaataatccctctgacagctggaaagaagaagaagaaaaggaggatcacaatggagtttaggaaagaggaattcaagaaactagctgggaatacactaggacatctgcacaggatattggagaagaagcagaaaaatggagaaaccattgagctgacagaagaagggcagccagttgtcaaagaagaaaaacaccagccagtagtagactgtacctgctttgggcttcctcgtcggtacatcattgccatcatgagtggcttgggcttctgcatctcctttgggatccgatgcaacttgggtgtagccattgtcagcatggtcaacaataacacagtctataaggggaataagcttgttattgagcaagctcagttcaactgggatcctgagacagtcggcatgatacatggttccttcttttggggttatatagtcacgcagattcccggaggctacatatgtcaaaaatttgcagccaacagggtgtttgggtttgccatagtagccacgtcaacgttaaacatgctcatcccgtctgctgccagagtgcacttcgcttgtgtgatctgcgtcaggatattacagggtctcgtggagggagtaacgtaccccgcatgccatgggatctggagtaaatgggcaccacctctggagcgtagcaggctggcaacgactgcattctgtggttcctatgcaggagctgtggtggccatgcctttggctggagttttagttcaatattctgggtggagttccgttttttatgtctacggaagttttggcataacatggtacatgttttggatacttgtgtcctatgaaagtccagcgcaacatcccacaatatccgaggaagagaggaaatacattgaggaaagcatcggagaatccacaggatttatgaacccaatggcgaaattcaaggctccgtggcgcaagttcttcacctctatgccggtgtatgcgatcattgttgcaaacttttgccgtagctggaccttctacttgctcctaattagtcagcctgcttattttgaagaagtatttgggttcgcaattagcaaggttgggcttctctcagctttgccacacttggtcatgacaatcatagtccctattggtggtcaaattgctgatttcctacggaccaagcggataatgtcgacgaccaatgtgcgcaaaatgatgaattgtggagggtttggcatggaagctacactgctgttagttgtgggttattcccattcaagaggagttgccatctccttccttgttttggccgtaggtttcagtggttttgccatatcagggttcaatgtgaatcacctggatattgccccccgctatgccagcatcctcatgggcatttccaatggagttggaacgttatcaggaatggtgtgcccactgattgtaggagccatgacaaagcacaagacccgtgaggaatggcaatacgtcttcctgattgcttctcttgtccattatggtggtgtcgttttctatgggatctttgcctcgggagagaagcagccatgggcagaaccagaagaaaccagcgatgaaaagtgtggcttcatccatgaagatgagctggcagatgaaagtgaagagcaaacccaagcgcatggagggtatggcagctatggtgccacccaaaccacaagccagcagaatggtggatgggcaactgattgggagaaaaaagatgaattcatccaagaccaaggaaaggacccctatttatatggaacagttgctgaaagagacttatcttgaatagaattacaagcaaagaatataattaaaccaatatcaatgtctcacctttaactgcaggactggcgagtacggaaggagagatgactggtatttcagtgtctccccactttcggccacatcatcacaaggcagcccttcttattgtttaaatgccttcccatttattataaataagggggcggggagataaaagcagtgcctactcttccttggactgcccctacatttccattggccaattctgtatcagtgatttgcttgttatgtgtgtagatgctgcaaaggcatgtgtgttataagaatctatcactcgtataagtgtgcaagcaataacaaatgagacggtgtgtttatcattgacagtgaatagcgttagacgtacacattactgtgtgactcccagatgctaaaaccagggatataatgtagaacatgtccatgatggggcatgaccagttctacatcccttggttttcatcaattttcattttttaatagaggtgtatgaaaaatatatatttccagatatctatatagaacattccttcttgcaaagggggatgaagggtcacttgccagccaagtttgttttgaattgatgtggcccagtgcatccagtgttttaaggaattagcaccaaacaggaatgccaagtatgagttgttgagcagtgcaactcccagcagccttcagctgttgtgaaattcaacacccagcagcttcagacagccattgactgggaggaggtgcaccatgtgccacatgtctgacttttctgtcctggagtaaaaaaacattggaaggtttatattataatccatggtatttgtctccattttgctagtgttggattaaactcgctaacatacagttgtgcaaattgtgcggtcatggcatgtccctttgaaatgatgataagaatatgtaaagtcttttatcagctgtttgattggtacccactcgtttcttttctttgcactccagactttttggttttttttttaatccggtgtggacagtttaaccaccatactggcaaatgtatttatttgttcataacaaggttacagatacatgcaactttggttgttacaatgaccctgctgtcgttataggtgtgtccagtacagtaaatcagcctctgccctaaattaaacccaaactgatcacatgggatgaaaccagtgccggacaggcccaccgggataccaggaaaactcctggtgggccctggtgtctgcttctaaatatttgccgtatattgagaatgagaggctatatagatggaataaaatattaaagtatgtaaagaaaaaagatttagagattagagattgagtgaggagaggtgttcccgtccgacactggatggaactccccctaaatttgaggccagcaaatatttatgagcctctacagaacatccaaaagttattttatcaggagatataaggttggagccaatgaacaatatcatcactggtagagcataagaagtgcattgctatggaaatttagcattatcattgtccatgatatttgtaatctgtctgttttattccttaaccacaacaagattttctatgattgagaattggatgccagacacccttgtgtcgtgccaaagccctccaagattttatccaaagaaaagagttggatattgctgtgtgagtttcttctgtccttgatgaaccattactccagcagagaaaggtgatggtttgcatgcagtgttttggtgtgagtcattataatttctattctcaggagcaggcctggccaccgcatgacccaaggcttttatcaaccttcaagatctgctaataatcccatcagcaaacttgagggctccacagatgtcatggtattgcatcacttcatgtagaagactgacaacattgctcttgaaatagaattacactggtgttataaagccatcattcagcaacgcacactgaaatgacaggttagactgcaaaaaacaataggctttctggaaagagtaacggcggtggacaattaaacatggaaatgtgcagtaattgtacataataaattctattccaattctgagttttgagaatgttatttttcactgctgtttatgactttgtcagttaaagttgctttgcagtaaataatgttatctcataaaaaaaaaaaaaaaaaaaaaaaaaaaaaa

SEQ ID NO: 236 - DNA, 1120 bp, Xenopus laevis
agactgcagccatgaaccaggagagcagcttcagagccccccccaagagacgcgttcggggctccaacccaaacatatcgaacccccaccagctgtttgatgacacaagtggagggcctgttcctcatggaggagactttcccaaccattcatccccagctttgggtatcccggcacaagcctttttgtcagaacccatgtccaactttgctatggcctatggcagcagcttggccagccagggaaaggagatgatggacaagaatatcgaccggattatcccagtcagcaaaatcaaatattattttgcggttgacacagtctatgtgggtaaaaagattgggctgcttatgtttccctacatgcatcaggattgggaagtgagataccaacaggacacccccgtggccccacgatttgacataaatgctcctgatctttacattccagtcatggcttttatcacatatattctggtggctggcttggcactggggacacagagcagattttcacctgagatcctgggaatgcaggctagttcggcccttgcttggcttattgtagaggtacttgccatcctcctcagcctttacctagtgacagtaaatacagatcttaccacagtggatcttgttgctttttccggatataaatatgtggggatgatttcaggagttattgctggccttctctttgggaacactggttactatgtagtgctcgcttggtgctgtatctctatagtttttttcatgatccgcacccttcgtttgaagattctctctgaggctgcagctgaaggtgttttggttcgtggagccaggaaccagctgcgtatgtaccttacaatggctattgctgctgtgcagcccatcttcatgtactggctgacctaccacctggtgagatgatgcattacctgcctggtgtacccagaagacgggtacctagccacacacgcagggatcaaaatggcgtttgtcacccaggtcaccctgctacgatgtggtttatcattatatatgttttacattgtgacctgcagatcctgtactgtttgtcatcaagtaaaagatccttctacagcaaaaaaaaaaaaaaaaaaaaaaaaaaaaaa

SEQ ID NO: 237 - DNA, 1696 bp, Xenopus laevis
tccagttgcagcagcaggagcagcatcacatattgcacaaaaggacagctcgcttttgcaattccaaccttaaatctcttgctttctcttcccaacatattgcttccgttatactgttcattattattccggctcaagtgtgcggctgattgatttcgccttgggagttttaacataatcactattttcacttttgcattgacagtagcaccttatatatttttctcattttggcatttagtccaggtcaatctgcatctttttttcatcatgaagtaacttgttagagtaagttgtttttcaacttaattttaaccatcagcagcaactgaagctgttacatcaatttttaatagaaattctttgtgcaccttaattgtttgagctggcagtgcctattgaagcctagatttctaaagtttcaaggactagcttgctatggcagatgctgtaatgtctgatgcgcatcttctgggctttaatacccgtggtaccaagagagaatcggatcagcagttgcatctgggaagcagtggtgcatctggcgctggagtcaaaaggcaacgtgtggagccagagcaacaggagcctggaaaccccatgagtatgccagtgtcccaagcatatcagggatttgcaccactaaacagccagggtaaccaggagccgacagctactcctgacactatggttcagccgtttgcagccatcccttttcctccaccaccacagaatggactatccacagactatggaagccagcacacacaggactacgctactcaatccactgagcatgggattcccttgtacggaggagggcagagccttgcagagcacagcgccccagctaccagcactgccaatgcatccagcacgacagatggctcacagacagagggacagcaatcacagtcacaaaacaatgaaaatagtgaaaccaaagcctccccgaaaaggcttcacgtttccaatatccctttccgattccgggacccagacctgcgccaaatgtttggacaatttggcaaaattcttgatgtggaaatcatatttaacgagcgaggctccaagggttttggttttgtaacttttgaaactagcgcggatgctgaccgggcccgggagaaattgcacagcacggtggttgaggggcgaaaaatcgaggtaaacaatgccacagctcgtgtgatgaccaataagaaaagtgtgaccccttatggcaacggctggaaactcagtccggttgtaggagctgtttatggaccggaactttatgcagttcctggatttccttacccaacagcagcagctgcagcaaccacagcagctgcttttaggggcgcacacttgaggggccgtgggaggacggtgtatggtgctgtgcgggcagtacctcctactgctatccctacatatcctggtgtgctatatcaggatggattttatggcactgaattatatggtggatacgcagcatacagatatgctcagccggccacagccgccacagctgccactgccgctgcagctgccgcagcagcctacagcgatgggtatggccgagtatacacagctgacccatatcacaccctggcccctgctaccagttacggagtgggagctgtggcgagtttatacagaggcggttacagccgatttgctccgtactgaagtgacgtaagcctattgtccc

SEQ ID NO: 238 - DNA, 3425 bp, Xenopus laevis
ctaaagatggcgcaggacgcggtctcggctgggcaggaggcgcgcttggctgtcagagagtgacgagcttgtgaggaagatggcttccgccggtgggggtgctctgagtattttggagtactttggtggggaggatggaaaccggtgcgggtactgtaagagcgaggctagcagcatgtcacacggaatgtgggcccataccctgactgttcaagactaccaggacctcatagacagaggatggagacggagtggaaagtatgtgtataaacctcttatgaaccagacttgctgcccccagtatactatcaggttgtccgcctcaaatttccagcccaccaagtcccacaagaaggtgcttaagaaagtgttgaaatacctccatgctggggaagtgtctcattccaaggatgaaggcacttcaggagaaccgatggattcccaggcagatagtcctgtttcctgtaatgtttccattccggacaagtctgagatcccagaggaggagctgaagcccctgaatatagaacaagaggaaacagtggaagatggagagtctgacaagcaggaggcaactcgtgccagcagcctgtgtgataggcaggaacactgcattcagaatgctgaagtggagacacacagccattcaaaccccaagccaggacaaggtgtggacgtcaccaagccaccctgtcgaaaagcaaaggatattcgtaaggagcgtcgcatgcaaaaacatccttccacaaacccagcctgtaaagcaaaaggcaactgcagcaagtctgtagaggagtttatctcacctccagagaattccgctcaccacttggaggtcaagttagtccctgtctccatggaggaccctgaatttgtctcgtccttcgatcgttctgcagccctgtatgccaaataccagattgccattcacaaggatctcccttataagtgcagcccagctgagttcacccggttcctctgtgattctccactggagctggagactcgaccggatggccctgcgtgtggctatggttcctttcaccaacaatattggctggatggaaagatcattgcagttggagtgattgacatcctcccttattgcgtttcctccgtatacctttactacgatcccgattatgccttcctttcccctggggtctattctgccttacgagaaattgctttcactcgcgagctgcagaagagggctgccgacctgcgctattattatatgggcttctacatttattcctgccccaaaatgagatacaagggtcagtataaaccgtcggatttgttgtgcccagaaacgtatttgtggacgcccatagaggaatgtctgcccctcctggaacgttctaaatacactcgctttaatagtaaccccaaagaaggagacaaagatatgctgacagagctgggtcgggttcgggtactgtataaacgcacggtgatgcccttcagcagatacaagaagaggcacaaagggccaaacgacgaggcagcagtgagacaatacgcaggcctagtgggtcagacctgtgcagaacgcatgttgctgtatcgcagctgagacggacaatgaatgcgggcgcggggatgtactgcatgctattttgttctggaacagcatggagttggcttcaatgaaggagtaggtgttagccagcaaaaattagcagtacccaaagccttcctctatgcacttatgctatgcaagggcctgcacgtcttataacattaaagaaatggttcagtgtaaggatgaaaactgggtacatagataaactgtgcaaaagaaaaaaaaaaatctaatatagttggccaagggtgtggtgtatgagggctggggtggctggatgtgtggcatggtggccggggcactgcttcctgcttttcggctctctaactctgagttagtcagtgactataaggggggccacatgggacgtaactgttcagtgagtttgtaattgatcctcagaattcagctcagattcaaaagcagcagatgtgtcccatgtgcccccctcaagtctctgattggttgctgtctggtaaccaatcagtggaaagcaggagggctggagggcaggaggtagtgttctggctgttgtgttgcacatccagtcacaccagcctttgaatattacatttttggctaactaactatattggaaacatgttttattttgcacaagcctgtctatttaccaaggttttatttttgccctgaacaattcctttaacagccaatgtaaggctgtctagctttaattcatcaacaacatccatgatcctcagttacttaaaggagaatgattagagttgtacttttgcaattgctggagagctttgggttactcccccccagcctcatgtccagaatatcctttatgtgttccaccacctctgcaaacttgaactagggcaattttggggtgggaaacattgcacctttaagttatttgttgttctagattaagctgcattgcctgtgtggtttttattagcgcttgtttggggtcgggttatacacgggcagataatgttaccgatatcagtcgtttagaccaatttgacagctaatctgtatgggggcttccgacgggtctttccgatcgatatctggacatgatatcgatcgggaaggtttgatttttctcccgaccgacccgtcggagcccattgccctcgtcgtaatccgatcgtttggccatggggtttaacgttcagattatcccccggatatagcccaacgagcggatcttatggtgcatggccacctttaggcatttgattggcagatgtcggatccaggcttagcccattggaatcccactattgtatgttttgccaaaggcatgaacaacctactgcgtttattccgaatgttccctgctatgttctcagcaagcacttttatgaggtgtccttcagatctaaatgcgctcttcattctctctttattataccatgtggcacagtccaaaaatggagcgcgtgcaaatgagcagttggaacgagcaacagcagtaagtgtatcaagtgcaacagcgagttgttctgtttgaatgtgtgactatagaatccttaaatatgggaacagccttattttactacttgttactgaaccccccacctatatctttactttctatgtgccaccttatgtaacaggagaagtaaaggcaaatgaagcgatgtagcaacatgggacatcatatatacacttcttgttgtggggtggggggtttagagcaagattaaggtttaggcaaattaaaggttttcttttttcctggcacaaaaagtaaaaaacatttttaagaaaaaaaaaaaaaaaaaaaaaaaaaaaaaaaaaaaaaaaacaaaaaaaaaaaaaaaaaaagaaaaaaaaaaaaaaaaaaaaaaaaaaa

SEQ ID NO: 239 - DNA, 3015 bp, Xenopus laevis
cccacgcgtccggcaggagcggggaatggaggagaatgagaacacaaagatgatctaattttgattcatgtgactaacagtgaaatggagaccgtggtcattgtggcaattggtgtcctggccactatattcttggcttcctttgcggctctggttgtggtttgcaggcaaagatactgcagaacaaagaatctgttgacaaattacaacaacaaaccaacagtggatttaattggagccatggaaacacagtcagaaccatctgatttggagctggatgatgtcgtcatcacaaaccctcacatagaagccatcttggaagatgaggactggattgaggatgcctctggcctggtgtcgcactgcatcgccattctcaagatttgccatactctgacagagaagttggttgctatgaccatgggatctggggccaagatgaaatccccatcaagcctaagcgacattattattgttgcaaaaagaattagcccaagagttgatgatgtggtgcgctccatgtatcctccacttgaccctaaacttcttgatgcaagaaccaccgccctcctactctcggtcagtcatctggtgctggtgaccaaaaatgcctgtcatcttactggtgggatggactggatagaccaatcactttctgctgcagaggatcatctggcagtgctcagagaagctgcattggcaactgaacctgaacggccgatgacaggagccgacaattttctgcaggagcaatctgctatctaaacagtagttgtgaagcaattcattggctgacggtccaagggaagatgctgccttacaggggccagagttctatcaattatgtccttggcttttaacagaatgtatcatatttctgatagcatctgactcaatgcattgtagttatacagacctcatgaagaacctggtcatgactcacgtacaccaaaaagatatgtttacaatatgaaaaaaatgtcccaaaatatgttttagtactgactggggaatgtcggatgcaggatactccaaccatcttgttatcagttaactgccaactatttacttaacataatcctcaaaacttcttctgttggctttaaaatggcacaggatggttattgatatgaaccatacaatgttccatccaaatgcacgttgcacagctttccatcactttgagttatcctccatgcaaatcatgcacagtattttggagagtacctacaagcagttccccatacaactatagcttattgttttaaatgtacttaactagcaccccaatcacaacaaatacatgggcaaaaatctgttgccacattttaaaaagcattccaaggtttcaaaacccaatcataggtcagttctgctgaatgacctggggcttgcacacagaagaccactctgcagctcccacaccaccattgctattaagtgcagcctattcatacatggagcacaaatgtagaacttcatgacttttttttatatttttttttgggatcaagaatctttttgatttttctttccttcctataacaacaaatttctgtctcccccttatgcctaagtacctctcttacttttctccatttcacttgacctacatgtatgtaacctttcctgttttgccatttaatgtaaatagttcccattatgccaatacaatgtgcttctgtaataaaccaaactctccccccccccaaaaaaaaaatggtagcaatttcagcaagacagtgcccccagattgtaccaattcaggcagtatggtcctgaattacagggggctaacctctaaaaataggcaggctggtgaatctctgggtacaactgggtgtggctaaggttgaataggggaatggcctacatcacaattttatatgttgaaatgtcggtaggtattacagactgagcatatacttcacttataatgtgagaatatttctttattaggtactttataatttacctcaaatagttatatcagcgcactgtatcatacgtattagcatgcatatttaaacacctcctcttgattatttgtaaaaatgacttcctttattgcttaaagaaattatgtagcgttggctatgcagtaaaaatttccatggccagagaaggaaataaacttttttttttatcttctaaaaatgtatgtttttcaattagttataaacttttagttggacatgaagcagtaaattatcttttcaaattgcctcagcattatcacggaaaatttggagcggaggctctagttgcccaatagaaaggaaggcaggagtgggtcgcctcaaaggcctaattttcataagttaaaaaggttttcctattttatggagccttctaagaatgaagtggaatttggttgaaattttttgcaaactgtttttatcttttagtgaacaaccaaatgttttaaatctgatatcatatttctataaatggtatttagcacctctagaacattggtcctggcctacacttcccctagatgccactcaattgcccaatctgccctaaattttagtcatctcttacttttttattgccaacatactcccagctcttgtatagtaaatatataaactatacattcaaggcgaaacacaaaaacttttcgatttaactcggatatatactttttgttgctagaacttacacattaggcaggcagcaaaaggaagattcccataagcagaagcagctagttcatacaaactctttgcaggattctcagtagaggaacctctggtatttgttgggctgctgccgtgggaaagcaaattataaaaaaaggttataagtggggtaaattggaccctattaattatagttattttaaaataggaaaatcagttcgaaatcctcatgagtatagtaccacccaaccatttcttattccatggaaattataaaaaatgtatttaagaatcagtgaatactatgactttttaaatcatttaaaggaacattaaacaggtttatggaataaaaaaaaaaaaaaaa

SEQ ID NO: 240 - DNA, 1508 bp, Xenopus laevis
cggacgcgtggggtttgggagaagaacgatgttagcgatgtcttttcgtagacttgtacctgtgggttggggagcgggctggacacctttggcgatcttgcggcagatcggctccttgccaatacagtcattccctaaagaggtaaagattgtggaagttggacccagggatggactgcaaaatgaaaaaacagttgtcccaactgatgtgaaaatccatctcattaacatgttatctgaagcagggctccaagctatagaggccaccagctttgtctctcctaaatgggtgccacagatggccgatcataaaaatgtaatgcaaggaataaaaaagtatccaaatatcagctacccagtccttactccaaatctaactggatttcaagctgcggttgaatgtggtgcaaaggaagtagccatatttggagcagcatcagagctctttagcaagaagaatattaactgttctatagatgaaagtttgcaaagattcaaggctgttattacagaggctaaggaagcaaacatcccagtgcgagggtacgtttcatgtgtacttggatgcccatatgaaggaaaggtagctcctagtaaagtagctgaagtggcatacaagatgttttccatgggctgctatgagatctctttgggtgacacaattggagttggaactcctggtggtatgagggacatgctgagcgctgtactagatgttgttccagccaaagctctggctgtccattgccatgacacatatggacaggcattggcaaatatacttgttgcacttcagatgggagtgcaagtggttgatgcttcagttgcaggtttgggaggatgcccatatgctcagggagcttcaggcaatgtggcaactgaagatgtagtgtatatgttgcatggtcttggaattcaaactggtattgacctaaagaagcttacagaagccggagcttttatctgcaaagcactgggaaagaagagccactcaaaagtgtctcaagcaatatgcaagctttgatcagcaacacacacattcagattttagaaagacatctttttgaaatattatattaaccatggggtaacccagctgactacaggagctgaaattcaaaagaagctggttgtggatcaacaaatgggccagctgcagttattctgagtactttgcctatgattgtatcaagaatattttcttacagtgttctgtaataattttcttgtgcacttttgaaacattgtatataaattaatgtaatgggaacctattactttaaataattatataaatattctatttttttattaatactaaccgaaagcatcccattcatgatttgtttgttttttggagaaatgggtagaaaattaatctaacttgtcatattatatgcatctcccatcacagaaagattggagaaccatatcacaatttagctgtagtgcggtctgtacagtgtttattgtacatagtggatattgcgtttaaaaaaaaaaaaaaa

SEQ ID NO: 241 - DNA, 1863 bp, Xenopus laevis
ggtgcccaaccccacacacacacacacacacacacacacacacacttcttcaaactggtcagccaagtgctgcggggagattccaaattccaagtgctgaaaactgtccatcacaagaagcactatgactgatggggactatgactatctgatcaagctcctggctctgggggattccggagtcgggaaaacgacatttctgtaccgatacacagacaacaagttcaatcctaaattcatcacaacagtgggaatagactttcgggaaaagagagtggtatacagcaatgcaggaccaggcaacactcatggcaaaactttcaaggtgcatttgcaactctgggacactgctgggcaagaacggttccgaagccttaccacagcgtttttcagagatgccatgggcttcttgttgatgtttgatctcactagccaacagagcttcttgaatgtcagaaactggatgagccaacttcaagcaaacgcttattgcgagaatcccgacatggtattgattggcaacaaggccgacttgtcagaccaaagagaggtaaatgaaaggcaagcaaaggaacttgcagataaatacggtattccctattttgagacaagcgccgcttctgggcaagatgtggagaagtcagtggacattcttctggacttgataatgaaacgaatggaacagtgtgtggacaagacccaagtaccagatgctgttaatggtgggacccctgggaaactagatgaagccaagccagaaggaaggaagtgtgcatgctaagataatctacaaactgggagaatcagatataccaatgggcaaatggctgagcaaaaccactttcccaggaacccaccgggccactgacctgtgctcttctgccattaatctattcctaacattccaaaagagactctccccctgggatttcccttggtactgtgtagcagtggtggtgatcgggttggtttggtatttgaggaatactcagagttgctattcacactagttactcatcactgctatatggcaatgcacttgtgaaggaattgtcaaccatgagatgcacattgaaaggaaatatacagaggaaaaagctgttactactgtataacgcaacgaaaaatattctattttggtgttgttacaggtcagattttcattgtgccattcgctgcaagcctcctcccgtattgcaagcacgtgattgaattaggcaataccggcttctgttttattaccactgagtcatgtattatatggactttgtgctgttaacatggaaaaaaagtaaaataagtcctgtcttatacgtggagaaaaatcctgctcaactgtttgtggctgattctacggtatctgttcaatgttagcgcttggcatctctttattgctattggcaaaacaattatcaaaagtgctgttacaatcaggggcttagtgagcctcattctgtatgttgaccatacgctgtttaatgatagccacaactctctcgggtgcttaaatgtttcaattcaaggagtcggcgcacgcaggaagaatagacatgacccggctggacgctatggaatttccttttcctccatctttgggaaatggtctacacattgggatttaaaaggttgaaagttctattctaatttctgtctaaaatttaacggccgctgttaaaactattaaagaaaaatatattccctgtttataaaaacataaccgtccatttatttttccatttgagtagtatgtatagtgtcaggccatggtttattgtgtgtgcacagagctgtctatatgtttgtattgatatgggtgggtattttcattgaatgattaaactcattataaaaaaaaaaaaaaaa

SEQ ID NO: 242 - DNA, 1948 bp, Xenopus laevis
gatacacacaggaaaatggttcctaacggatctttaaattttgaagacgaccaatttattgaatcatccgtggctaaattaaatgccttgcgcaaaagcggacagttttgtgatgtcaaactacaggtctgcggccatgagatgctggcacacagagcagttcttgcctgttgcagccccttcttatttgaaattttcaacagcgatggtgaatctcatggtatttcccatgtccgatttgatgacttgaatccagaagctgttgaaatcttattaaattatgcatacacttctcagcttaaagctgagacagatcttgttaaagatgtatactctgcagcaaggaaacttaagatcgaacgagtgaaacaggtgtgtggagattacttaatgtcaaaaatagatgctcagagctgtatttcttaccgtaattttgtaaacacaatgggagattggcgccttttaagcaaaattgaccattacatccaagagcatcttcttgagatttctgagcaggatgattttcttaaactcccaagactgaacttggaaataatgctagaagaaaatgtctcgctccccaacaatggtaaattgtatacaaaggtaatcaactgggttcagcggagcatatgggagaatggtgaaaatctggatgccctaatggaagaggttagtctggcaaaagaatgactgtaatacatgtaggatgctaggaaagtcaattttttacaactaattcaattatccttttatgataattagagcccaaagtaaagaaaatatcagttttcagtccaaaactggtaggtttgaaggtgagactgaatcttattttcccaaaacaaatcttatgttttttttccaccaattccccctttcacttttgtactgttttaagttctaatgttttttgattgaaaattgctgtagactttcaacattttcctgcaggtttaatgcttgaattggcctttttctttagaaaatttctaatagttttttcctcgccattgattatattttcataggttatttaacaaaagtaggatacccaagatggaagatcaatgaagatactccaaggtttaatcgtattgaagctcaagtctgccctatgccttctaagaacatccactctgggcagagaaccatgatgatgattttaatggtgtttactccttttacaggatttgtttgacatgtacagcctaaatttttctagctagaagtgcctgcctactttcttactaattcaacagaaggcatttataagattaccattgtgttggtaccatttgattttatttctttaggttttgctacctttttataaaccaacatgagggtgattttatattcatagtttcttacccggcatacatttatagtaaaggttgcatgcaccagcaattttagatttgtatattaaaaaaagtcaagccctgatgttaacagggaattaatttttttaagtgataactggctacttgctatacagtttgtgtcttttaaaatataaacaacaacaatccatgtgtaatgtgcacattttattgaagtattgttacattttgttaaccccccttcagtatttacaaagcacatgaaaaatgttttaacccaaacggcatcacagtgatctgtgattttttaaaatatttgaattgttaattttggtaaattcccacactatcatttcacctacaaaacaatggactagagtatgtaaagactgcatattaaacataacttattggtacagacaccttacttgaattgtattccagtaagttaatctaaaattaattttaagatgtagaattgtgttaatgtgtaatttaatgtgcatttgtgcatgtacattttgcaaaaaattttttgttcttgactttttatgaatttctgttaaaaaaaaaaaaaaaaaaaaaaaaaaaaaaaaaaaaaa

SEQ ID NO: 243 - DNA, 4069 bp, Xenopus laevis
cccacgcgtccgcaggaaagccgagagaatgaagctgaaagaaatcgaacgatctgctgttcaagtctggagcccagccaaccaacacccagttttcttagcaacaggaacatcagcaaaacagcttgatgcctccttcaacaccagtgctgccctggaaatttttgaggtggaccttggagacccccaccctgctatgaaaagaagaggcgtctatccagtctctaacaggttccataagatactttggggcagctttggaagtgacctgttgggttcgtctggagtgattattacgggaggagataatggagtgataactttatatagcgcttctcagatcctcgcatcaggagaggaaccagttattgcaaaaaatgacaaacattctagccctgttagggctcttgatttaaacccatttcagagcaacctacttgcatcaggtgccagtgattctgaggttttcatctgggacttaaacaacttcactgtgccaatgaccccaggagctaaagctcagcccatagaagacatcagtgcagtttcttggaatcaacaggtacaacacatcttatcatctgcccatcccagtggcaaagctgtggtatgggatctccgcaagaatgaacctgtcattaaagtcagtgaccacagcaacagaatgcattgctcgggaatgatgtggcacccagaaattgctacccagcttgtcctgtcctctgaagatgatcgcttacctgtaattcaagtctgggacctgcgttttgccagctccccactgaaaatgctggagaaccacacaaggggcattctctctatgtcctggagcaaagatgacccagaactactgctgagcagtgcaaaagacagccgaatattatgctggaacccaaacacaagtgaagttgtttacgagctgcccacagaaaaccagtggtgttttgatgttcaatggtgtccacgtaatccatccatattttctgctgcctcatttgatggatggataagcgtatattctgttatgggtggaagcatagaagcaatgcaaaggagtcaagcagacaagatttcattgtcctttaatagcctggatccttttgggacagggcaaccgctacctccactacaagtgccgcaacaagttgcacagaccactgtaatccctcctttaaaaaagcctccaagatggattcgcaggccggtgggagtctcttttgcttttggtggaaaacttgtttcttttgactgtccaaaagcttctgtgcagccaaaccaggagtcccttccacggcaggtttacatcagccaagtcagcattgagaaggagttcttggcccgatccagtgagctgcaagcagcattgctctctgggaaccttgtaaactactgccaaaataaagtgcaaagttcccaagatgtctacgacaagagtatctggaacttccttaaggtgaattttgaacaagatgccagagagaaataccttaagctgcttggctacaacaaagaagaactggataagaagatctcaaatgcactgggggagaactttcagaacaagagcagcccttcagagccagaggatataattcaaagcatccagtctgtctccagccaggattccagtagctttacaggacaaacagcatcaaattcttcttccgtggagttttttaatctacctcctcaagattctgccaagtttgaaatcccagtaaattcagatactgatgggttgatcagccaggcacttctcatgggaaattttgaggctgctgtagatgtgtgtttaaaacatggacggtttgccgatgccattatattagccaatgctggtggagaagacctactaagagaaactcaacagtggtactttgctcagcagaaaaataagataactacacttctgtcttcagtggttcagcacaagtggagggacatagtgattaaatgtgatccgcagagctggaaggaaaccctggcactcctgctgacatactccaaacctgaggaatacgctgaactttgtgatattcttggaaaccgcttggagattgaaggagagggaaagttgtactcagaggcctgcctttgttatatatcctcaggaaatgtggagaggctggtagaatgctgggttaaaagccatgatataactaacccacttgcactgcaggatcttatggagaaagctatggttttgcgaaaatctattgaactacttcgaggagcagagttgccgccccaaggaccagtgatggcagagaaagtggcagagtatgccaatctgttggcctcgcaaggaaaactggcagctgccatgagcattctgccagttgattctcaagagacggcagtacagcggctgcgagatcgtctccttaatgctcagggagagggtgtgagaagtcagagaaatacatcctatgaacccagcatccagccacctttcggtttaaaaggaagcaaagcaccagaaggagtccactatagcaacagacagaatttctcacaatctcagcctggcactggagttccacctataacagcagtgccttcagtattcacgcctcagccattgcccacagcaccaatgggcccccctccaggtgtgccatttcagacagtccctgggctaccttctaatacctaccctagaccacccggtgcttggcagacatacccagcaccacagccacctgtaccagcatttgcacactctccatccttcaaaccaacaggccacccagtcccaaacactgctgctttgcccccatcacctgtgacaggacatctgcctcccatcagcacactgaatttaactggttttcccacagcatcaggacccatgttttgccctccagcctctattccttcttcagtgcctgctgctacacagcctgtttcaagaacatttacagctatgggccagccttccactcctctttccatggcctcctctcagcccccatttaactaccccatgggtgcaagttttcaccatgggggacctggtgctcccacaagtctaccaccaccccctacaggttatttcccctggcttcagaaccagccaaatccagcagcaagtgaacaagaagcctggagtgatcctcatgctttcaaagctggtatacaacggaaaacgtctaatccagttgttcctcttgcaccaatcacatctcctgttatgaaccttcccaatgaatccgagaatttgcaacctcagctgagcagcagctatgacttcaatcaggctccccctggggcacctaaagaaacaagtatgcagaggatgcaccggctgccagtggaaaagatagagaaaaaagaagtgccttcagaacatcagcccctgcaaaagtcatttgatggtctagtgcagaggtgttcagctgtggcatcagacccgaaaactaagaggaaattagaagatgctcttcagaggttggagtgtttatatgacaagcttagagaaaacaatctatcccctcacattctggctgggcttcatgaaattgctcgttgtgtcgaggcccgcaattaccctcaaggtttggttgtacatacacaggtagtcagtagcagcaacttcagtgaggtctctggcttcatgcccatcctgaaggtcctcatgactattgccagcaagctgtgcgtttagtagcaagcagctctgatggactctggacacaggctcactgaaactgtccctggaaggactgttttttctctacaggattggacatttatgtgcctcacaggtgcaacttctaaatatgtgtaagtatgtgtttgagtcttcatacaaatatatacatatacggacacatattttgtgcagtgcactatagaatgcttagggaacagaatatgatgaatatgctcgttccatccataaaacaaattttataatatgaaataaattaactgatatctagtctttttttcctgctttacttcaaatgctgtaagtggattttggtgacaaataccaacacaatcagactggaatgtcataagtttcaattacagtttattacaaattcaaaaaaaaaaaaaaaaa

SEQ ID NO: 244 - DNA, 960 bp, Xenopus laevis
atgcgtgcggatagagaccacagaggtttcctagaggactggccccgggtcagcaagttcgtactgtccgcttttgcagcgtcggttgctgaattagtgacgtttccgctagatctaacgaaaacccgcctacagattcagggagaggcgccactgaagcagcatgggggggtgggatcagcaattccatacagagggatggtgcggactgcgagaggcatcgtgcaagaagaaggcttgctaaagctttggcaaggagctactccagctgtctataggcacattgtctactctggagtgcgcatggtggcctatgagcatcttcgggattctgtgcttggaaaaagggatgatgacactttccctttatggaaagctgtggttggtggaatgacagctggagcgattgggcagttttttgccagtccaactgatctggtaaaagttcagatgcagatggaaggaaagagaagactagaagggaagccacctcgggtgcgaggagtatatcacgcttttgtgacaatcgtttctaaaggaggaatacggggactgtgggcaggatgggtaccgaatgttcagagagccgctctggtaaatatgggagatctgacaatgtacgatacagcgaaacactttctactacgaaacacacctcttacggacaacagtttatgtcacaccatttccagcatatgctcaggcgtagttgctgctactctaggaacgccagctgatgttatcaaaacccggataatgaatcagcccagagacaagcatggacgggggctgctgtacaaatcctctaccgactgccttattcaagcaatacgtggcgagggcttcatgtctctctacaaaggctttatgcctacatggatgagaatggctccttggtctttggtattctggctgacgtatgaacagatcagaagacttggaggagttagttcattctaa

SEQ ID NO: 245 - DNA, 8038 bp, Xenopus laevis
cggacgcgtgggctgtcacctccttctctgcactgctgtccctgctgctgctgtcggcttagcaaggagatgagcttcttgtttggcaatcgctcttcaaagacattcaagccaaaaaagagtcttcccgagggctcccatcagtatgaactactgaaacatgcagaggccacattgggcagtggaaacctgcgtatggctgtcatgcttcctgagggggaggacctcaacgagtgggttgctgtaaacactgtggacttctttaaccagataaacatgttgtatggaaccataacagatttctgtactgaggagagctgtccagtaatgtccgctggcccaaagtacgagtaccactgggcagatggaaccaatataaagaagcccattaaatgttctgctcccaagtacattgattacctgatgacatgggtacaggaccagcttgatgatgaaacccttttcccctccaaaataggtgttccatttccaaagaacttcatgtcggtagcaaagactatcttgaagcgcctcttccgagtctatgctcacatttaccatcagcactttgattcagtgatccagctccaagaggaggctcatctgaacacttcttttaagcactttattttctttgttcaggaattcaacttgatagataggcgagaacaagctccactgcaagaattaatcgaaaagctgacctctaaggacagataagatagcagctgattgagcaccaaagcctttctttcaagcaagctttgttttctgaaccttgttgcattcaaagcagccaaaatctattttttgtgtgcttatactgagggaatatgatgtaggtattttctcatcttcctgtgattccaattgattgtgtgttctacataaggtgttcttggagggaggaagaggtatattccagatcttaacccctaaacatacattttcattcctttctgcagtaaaggaatctgagaatattatgtgcctaaattatccatttcctatgtaactgctccgcttcacagatgttttattttgtttcattatttcgttttttttaatcagcagctgattgtaggaagccctgtggctaaaaaattgatgtcaggtccaggtttagcaggttccctttttcctataactctatctgggtaattaggacataatgacgaacttaggtagtttcagtcatttatgctggggtctccaaacacatagtcaggaggtcagttcacataagtggtattaagacaaatttggagttaaattggagtaaaactaccttttcattagaaaatcaaactctcctccacttgtaaggtcaataaagttggagtaaatcagttccatcagtgtagttccatcgtttgatgtaattaactgcaccaaaatgtcattattaacaccaaaacacttcaataaattggtgcaagttgcactccagatttgtctggagaaattaagtactgcagattcactaaagtggcattctagaacaatgatctaaagtgtacaaaacctctgagttttcaaaatgtcttattttttccactaatatttcttccagtgatttcatttaccccacttttgtaaagtcctccacagatcattatcttttcaggcttagtgtccttgtaaaaggctgtgcattttgagcacatgagcagctatgcaaaagcacacttactgagcaccaggagcatttacattgcactagccagttgccgtgcatcgtgcatgaaaatagaaatgactgttgtgaaacccacttttttttttaaacgtttgaatatgtatttcctaaactatctagagcactaaagtagtcacagtgctagaatgggtaacgtcactaatcaggtctgcttttaagattttgtattgcagagtccatctctgggagatagttgtgtatatgaggttttattgtatattgcagcgatttagggtttgtgaagatccactaaattagcaatacctatgtttatacagattgctactgttttgaagtggcattgactagcattgttgcagttttacaggggcatatcactaaacatactcatgctgggctctggcatctgtcctttatgccacacacactggggcttatttatcaacactgggcaaatttaccttatagcaaccaatcagtgattagcttttaagccaactgcaagtagaacaatgaaagcaacaattttattggtttccatgggctagtgcccatgggcaaatgtgcccagtgttgttaaatgagccccgctgagtttgcagccataatgctgcatactcctggaatcccacatatgtgagtaacaaagggttgtgagctgcaaggctttggatttgataataatatattaattaataatatattaagcaatatatcaaaatcattcatactgcctggccatattaacacaagcatgaaaaccttgaagcaaaatcccttggatcattagtagtataatccactcaaatggaatcaaaaccagtggcccagttcaacccaaacatgccttataaaatgttgacagtaactgagttttattttgcaaattattgttctatgctggccttgggggagtaatatttatatatacgcctaaattcctcatcagatgactgtaattatctgtatcacggttatctacactggtgtatgttaaattgaatatcctcattttcatcaggttatataaacctttttaacattgcgctttgaatgctacagcttagtgtttcatataaggagcctgtatttcagtgttactataattgtaaatatattactatttaaagggatttatcatagaaataacttactcagagtgtttttttttattttaaatgtttgttgatattatcaggcttttagctcaacagctccatgtaagatctgtagtactggtggttcgaaggttagtttactacagttagatgctgtaaaacactgtctaggcttagcgctatgttgacaagctgaggaaagttatatactatcattggtcaacatacctcccaactgtcccgttttctgcaggacagtcccaattgtgacagctcagcccacagtctcaggtttcttactgaaatatcccgactttctctttgatctcctgctctgatgccagaaaaagatacaaagtttctgaaacttaattaaaataaggctttttggcagagaaaccttgaacagtcagcagctgcacttggatacttttgtatcaatttaagataaacaaagatacaattgtaactatttaagataagcaggtctctttggagaattgagactagcagcttaaagggcaattttctttcattaccaaaaccattataacacattaaaaacattgcactaaaacttccagaaatgtgttcaaagtttcataacctgccaaattttgtaaaattgacgtgtaattagggggtgtggccaaaaaccgttgctgcgttgtgcacggcacagctttttgtccctatttcatttgttggggggtttaactgctaaactgctagtgggagatttagtaagctatgaagagctggaagagatcagctgcttccttacagttcctaaatccaaagggaatacagagagcaatatgcagaaaagtatcttattggagacaccacctgcatattcaattaaccaatgaactactgagctgtaaagatagtctaagctgaaagcttgatattagcagtagaatagcatgctgacctttttttatttactttagaccccttgtaatttgcattgtgaatttaaaaataattcattttggaattgtaattttaaaacaaggattctaaacctatgggttcaccatgaactcctttagtatagccccttagctatactatgtttataccacatgtgttgttacatttatgcatgccatttggctgcaatttataaagccatattgaaagtgtaaggtacataatccacaataatacagtcatttttacacagtttcttggtccacagtttcagtggaggaacaatttaatcagaaggcacaattaataatctgccaagggaaaaataccactatattttacttttaatgccagctaattaatttgcaactgaaggcgaggcgacacgactgtcggacgtctgcatgcgacagtcgtgtcacgtcggatcaatgctgcaaattgatccgacaatgcattcacttaccttatctctgtcgcatgccatttgtcggaggcttttggttgcatcagatcgcgttgaaaacatttgtgtagtccaaccctaaatcattttctagtagatttaaggtaggaagatctattctcaagaaaacccaggtcctgagcattctggataacaggtcccatacctgtactcttactaatcttttcacttttacattctgtaacttctgtaactgagtgtaacttttacattttctattgtgcaccttatactgtatattcccctccttattaattgattagcttgtttataaagggcagtcactccagggaggaaatggcaaatgtggcagttacaaggcaagcatacctccttaataagtaatgtaaattgtaatggtaaatatccaaaaaaaagtttaccggacaagtattactttgctataactgaagagtattggtgctaaaataaatcagggcttgtggccaacacatccaattttattcacagtgaaaaacagactttgccattaaaacccttacattatttatatacaggtatgggatccattatacaaaaaaagccgttatccagaatgctccgaattatggaaaggctgtctcccatagactccattataataaaagaatccaaatttttaaaaatgatttcatttttctctgtaataataaaacaatactatgtacgtgatccaaactaagatataattaatcattattggaaacaaaaccagcctattgggtttatttaatgattttgtagtatagataacgtatgaaggtccaaatcatggaaagatccattatccggaaaaccggcattctggataacaggtcccatagctgtattatactggcacaactttaaagtgatttgcagtatagcagttgtaccttgtgcttaagtgtcaagcacttagaatgatgttgcaaacacagatagattggacatgtgcttgtaacacgtgcacagtaataatgtacatatcacagaacccataagcccattgcagcgaaccttgtgcagatctgtccaacctggttcagaagaattgcatttacaaaccactataaaacggacaacaacaaggaaactatgaaaaaagcttctgtattgcagggtctcttgatagtacaatggttactcaccacattaatgaagtggcccaggtgcaccgccctgagccctcagcacaaggggcggataaaccgaaaaatcaatatggagcaggcactcaaaggcaaaacttccaccaggcaaatgttcaaatgtgaagaagtttattgtgtcaaccagcctgacgcgtttcgtgttccaaacacttaatcgtaggctaaactcctagagccatgcctcaaatatttatacataaatggtccaataaaataaacaccccaattaccagtccacccaatcccacagaactttacccaggtgcatccaatgaaactccaacctagttaaattggataaaggtcaaaccaggggtcaaaaggagaaggtcatcagtaaccatatttgtacacccttagctgtgtggagtgacatattgatgcacccgagaaaagtttaaatcactagtgtttataaatacacagtacaaaatacataaaaaaacaggaaactatacccaactcccacaactcatgtttctttgttggagatggttttacacagacaatgtaggctgattggtccaatcaacccatggcaatgattagcagtccagtacagagagtttcgctgctcaggtagtgtgcatcttacaaatgttctgtacaaaagcacctatgcatcctatatctcaccaccttaaactatactaccactatattaaataaaacaattctgctacaaggtagtgtaatgccactatttcacctacactttttgtattttttttcctattgaaccaccatattgacaggttgacttctagtacttctatagaagtacttgactactagttctagtacttctagtttgcataactggatattgtaccatagtgtatgtgccacagggaatgtgtgattaagttgtaccacaatgaaacaaagtattattacccactgagtaatagagcttgtttgtctgctctcctctgaagagtaacaaaaagggcctgctttctttagccttatcaccgcattacccatttatcccttccaaaatacgttatgttgcaatctattagatgcttcacttattttatttgtttgtgtatagtggattttcgcaaatttatgctaagccctggtcactataattcatagcaacgtgacataacagatcaacagttttgtgaggtatgatggtcaaaacaacaagaaaaaggctggtttttcgaatagatttgtacaatggattttcatttcttataaatggatatacatgaaatacatgccatctattactgattaaacacagttctaccaaaagttgtaaacaatgtaatggaaagtaccaagtgtagaggcttttacgctaaggatgaaattattgtacccaaactggcagttcatgcagaaatgtaggcgtctatgcatcacttaatttctgaaaaagtttgtgttcctgagacaaggccaaaagaatttattactttacaataaaataaatatgatatgaataatctcatgcaaagatgcagattggctaaactaaattgcttattggataagtgatagcataggttggtttatagcgtttatgcattcaccctagaaacattcacatttatttggatttatcctaaatatgttttataaaagaaagcaaaactcaggtcacagattaataatagtaacaatcgtgtttctctctagaatgcttgggccacaatttgcatttgcatattcccataatccctgactagagagtataataatccctggacgagattaacatccaagtctccgtaccacccagtagttttaatactttatcgggccttctgtagaactaccgtatttttgccataaagagaccattttggctgcttttaattatcaataaatgaaagaaatgcaaatacatttttggattcacagatcagcaaagactctggattatttactaaaactaaattttttctcataatttcaatcaaactattttgactaaactcccgtccacgattttaccttatttattaataaaataactgtaaaaattcagttgaggaaaagtcttgataaaatctagcaaaaactcaaattgtgtgaatgtcttgattttgattcctgaatcgctcaatttttttcgagttgttgcccaaaaccactgaattgttcagattatcatacagaacccagaacagaccacaatatcttcaaactggaaaagggacatctgccgttgacttctataggatctcgacaggtttgagatgaagtattttcagattctgacttttagtagcctaagtgtataataaatcaatcaagttttcccctttaaaagttgaccagaaaaattcaagctttaataaataaccctctcagggtttgtttccttggttcgttgaaagtaaagttggattttagtatttatgtataacgctcaactgtaaaagctaagtgtgccaatactgcttcaggtttttaacaataacctataattttaagtcaagcatttaaagacagatttagaatgtttaaagctgtagacagttgtaaataatgtatacagattgtatttgatggcttaaaatatttcaaatccttttttttcttaagtaaaaactgagttctgtttttattacaaataaatatcttgtttgaccacaaaaaaaaaaaaaaaaaaaaaaaaaaaaaaaaaaaaaaaaaa

SEQ ID NO: 246 - DNA, 2352 bp, Xenopus laevis
ggaagccggtgttagaacggtgctgctatctgcaggccagggtttagaagaggatggcgcagactgttcagaacgtgaccctgtctctgactctccccataacgtgtcacatctgtctgggcaaggtgcggcagcctgtcatctgtgtcaaccaccacgtcttttgtacagtgtgtattgaattatggctgaagaacaataaccagtgccctgtctgtagggtgcccattaccgctgaaaatccctgtaaagacataataggtggaacaggcgaaaatgaatgtgctctcgatcattcggttcgaaaacacttgcgtaaaaccagactagaacttcttcacaatgaatatgaggaagaaatcgaatcactgttaaaagagagagaggaactgaaacaaaaaaatgtaaccttggaaaaagagaggagtcccaccacaactgtctctttgggccatgactgtaactgtggaacaaagcaggggaccgagaacactagttccgaacagagcacatccgaaaagtggaagaagaaacttgaagaaacaaatgctgcgtccaggaaacttgtagctgatgtggaaaagctcaaggaggaaaatacaaagctaataaatgagaacattgattatgtaagagaaaattttcgactcaaaactgaagtagacagcagatcaccacaaaagtttggaagatttacagtggctgcactccatgccaagattgaccaatatgaaaaggagatgaacagattaaaaaaagctcttgagagaagtgataagtacattgaagaactggaagtgcaggttgaccagttgaaaaggcctgcagattggaaaccgaatgagcgctcacacaatgaaaatccagtccgggataaagagactgtaaattcggaaataggcgattcatcacttaattatgaaggagtgaaactagaacagatggataagatacctgaaaaggctgagaaaaaccaagaggattccaacagtacgtgcccaactgcaaataaccacaaattcattgtgaacaaatcagaatatctttcacggacagggtgctccatggattttcaaaaggacagaaaatcgtttccaagtagcagttctgccacatggaaggagagcttgaagagtccacatggtaaaaactcctcacgaaataagccaagggagagcaacacaccatgtaaagaaaaagaaatccatgagtttagtagtccaggcacatcactgtcttttagctctcttcagctaaacagtcccgactgtaaatttactcttccatcaaatcaagtgaatgccaaaaaacccttaactcatcttagaaaattagtttttgatgactcgcctaaaaagagaaaaccaaatggcttttccaatgcaaataataatggaggattgtcaaaaccttttaatgaaccaaaatcagaatattgggcttgtgaagtcaaacataaacattcaagagacaagctaaaagaaagttacgtgcaattagaaagcctgaaaaataaagagggacagatactgcaagcattaccttccctgagcagtgaagaaggcaatcgcaccacaaccactagtgaaagttccatggatattactttcttagatgttaataagctggattccatgatgtcaacgttggaaggcaatgaaaaccctcattaccacagtgttaaatctgatgctgtcatgcattcaaattcacagccaagaaatggacttcaagccctctattcaaatccacatagccagtgtgctggtggacttttatctcatgaaagtcggtcttctgataagtctcacaacaatgattttcatacaagtaggagtacttcaagtttgttgacacctttttatgctacagcacagtcctactcttctaaaaatctcatggacttaatggctccagagatgaccagtaattccggctctacatcatacactgataataaaaatggccttacatcaaaacgaaagctttttaaccctatttgtgacagtcctccaaagtcctttaagccataaatcttttttttttttttttttttttaacatttgtggaaagtcatgtgatgtcactggttcatcataccaataatattttatttttataccttgaaggaaaatttaaaaacttaaagcatgttagtaccacagtctggtgtgaagtgaatcaatgttttatgcaggtaacattaggctaaagtgaattttatgaaaaatggatttataacaagtacatatagtctgacggttgtctttggtgctttaatcatggcaaaaataaaacatctgaaacaaaaaaaaaaaaaaaaaaaaaaaaaaaaaaaaaaaaaaaaaaaaa

SEQ ID NO: 247 - DNA, 5278 bp, Xenopus laevis
cccacgcgtccgggagagttgaagggtcggaggttgagtggagggagccggcgccgctcatttgtctgttcagtgaatctacggaaagcgcggggagaaagtcaccagagagaacttcttcttcttcccaagcccagagccactgatgttccgtgtgagcagagggacggccacggagtagccacgtggacccattgggtgatggggggcaggtgacagttgctgaggatgcccctgattgacaagctgcgtgagaggatatcacgagccttctacagccacgggctgctctgtgcctcctaccctatccccatcatcatcctcactgctctctgcattctggcctcctgttaccccctgctaaagcttccgctgcctgggactggcccagttgagtacgtcacctcagtgaaagattattcacctccacctttagagccgaacccagaggaccacagcgaccaacctgattggtacgtggggctgcccgtggccttcatacagcaggtgttggttaaagctgtcgtatctccgtgggacaaggacttcctggctgtggatgttttccggtctccactgtctcgtgtctttccattggtggaagagatcaggaaccacgtgcttagagacaaatcccaggagaagagtctagaagatgtgtgtctccaggtgacagacctgctgcctggcctgaagaagttccgtgacaagttacctgaacatggctgcctactactttctccagccaacttctggcagaacagccaagaacagttcagcagtgacccagaccttatcagaaccatccatcagcatgagcccaagaccttacagacctctgctactctcaaagacttgctttttggagtcccaggaaagcagagcggagtcagtttgtacaaccgcaagaggattgtatcctacaccgtcaccatcgctcttcgcagatacaatgccaccttcctggacagtttaaggtcccgactcaagcggcaacaccccagcaccaactccagcgcagccagtcagcacattgtacatgtacattttaaggaagaaatcggtatagccgagctcattcctcttgtcactacctacatcatcctcttcgcttacatctacttctccaccaggaagatagacctggtgaaatctaaatgggggttggcactggctgcagtagtaacggttctgagctccctgctgatgtctgtcgggttgtgcactctctttggactgacaccaactctcaacggcggggagattttcccatacttggtcgtagtcattggtttagaaaatgttttggttctgactaaatctgtcgtatcgactcctgttgacctggaggtgaagctcagaatagctcaaggactccgtaatgagagctggttcataatgaagaacatggctactgagctgggcatcattctgattggttacttcaccctggtacctgctatacaggagttctgtctgtttgctgtagttgggctggtgtccgacttcttcttacagatgtttttcttcaccactgtgctgtccattgatatccgcagaatggagttggctgatctgaacaaacggataccagcagaagcctgcatacctccccctaagcctggggctaaaagatacgatcgccagccaaccctgcgtcctgccacccctcataccatcaccctccagtctttgcgaaatctgcgcctccccaagagactgcgcctggtgtacttctttgccagaacccgacttgcgcagagaatcatcatggctgggacggtggtctggattgggatccttgtatacactgaccccgctgggctgcggaattacttaacagttcatgtgaccgagcagagccccctgggaggagcagtcatgcctcctattcctgtaccagtgctgtcggcatccaacccacacggccccctctcagctgtcttccctacaggctcctcccagctgctggaaaaccaatcgcaaagagacagcaaggaagtgattgactcgctgagctccaggatttgggaagagagtcaccctgaagacaagagcaaagagagagctgctaaaatagaggacaaagctcacacgcaggtcacctggggagctgaagatgaggagacttggaggaagctctcattcagacattggccgaccctcttcagttactataatatcacgctggccaaaaagtacatcagcatcctgcccatgattcccgtcacactgtacctgacgccacaggaggtgtctgatgcgcggcacccgcaggaggctcagcactcgcacccctatctgcagcgggaagggaagccagacgaagcctgggctcgagtcgaggccaaaggggctgagaagcccaccgaaaatcagacgccagcagatgtcaccttgtacaaggtcgctgcattaggtctggcctctggaattttcctggtcctgtttttcttccttctttatcggctcctgtgccctaagaattatggacagaatggagtgtcccacggccgcaggaaaaagggggatctgccatgtgacgactacggttattctcctcctgagactgagattgtgccccttgtgctgagagggcaccatatggacattgagtgtctggccagtgataagatgctgctggtgagctgctgcttggctggacagatccgcgtgtgggacgctcaaagtggagactgtctcacaatcattcccaaacccagtttgcgcagggagagcagtggggtgtttgagtatcaggataactgggagccgacccccgagtgcaagtacaaccctgaggagtctctggaaaatggttaccagctaaagagaagaacactgcaccctcctctcttctctgaccaaccagatttaaccagtctgattgatactaacttctctgagcaacctgcgaacgaggagtccggggccaggcagcggctgagctgcatcaaacaggaatctcctcccataggttatgactttagcagcctggtacagaaagtgtatgaggagcatgaagtctccagctttggcagcttccctcttgtcctctctccagccccttacggacagtgccaactgtcatcagggaggcggagccaaacgcccgcgggctgcgtggatggcagttgtgcccgaaggaaaagctccacagaagagactactggttattgtaatggctcctcctcacccgccccaagctggactgattcttttgagagctcagtttggagcctaggccttcagggaaacttgatagtagttgggaggagtaatggtaacttagaagtctgggacgccattgaaggaagtctccgctgcagtaactgcgatgggcagagtggcatcacatctctggtgttcctcaatcacagggttgtggtagcgaggctcaatggctccatggatttttattgtctagattcccaaaaatcctccaaccagctgcaatttagaggtgccccaaacagaagcaatgtccccagctccccactgtacagtactgatgatgtcattggctgccagcggacccatacagtggcctgtgcccaccggaagccaatcactgccctgaaagcagcagcaggccggctagtgacagggagccaggaccacacagtgagaatataccgcctggaggatgcctgttgcctcttcactcttcagggacactcgggtggaatcacggccatttatatcgatgagacgatggttctggccagcggggggcaggatggagcaatctgcctgtgggatgtattgacaggaagccgggtcagtcacatgttcgggcaccgtggtgatgtcacgtctttgctttgcactgcttcctgtgtaatcagcagtgggctggatgatgtcatcagcatatgggacaggagcacagcgattaaactctactccatccagcaggatttgggctgtggttccagcttggggctcatctcagacaacctcctcgttacaggaggactgggctgtgtgtctttctgggacgttggttatggggacctcttgcagacggtttatctggggaagtgtgaggattcgcagccggcgcgtcacattctagtgttggacaattcggctatagtgtgtgactttggcagtgagctgagcctggtctacgtcccctctgtgctggagaagctcgactgagacctgtgcactgggacctacagctcacgctttaacccttgcctgcccttgcagcggggcagttactgttagttgcctataatatattccaatggaattctacagtatacctggtacagccccaacctgacgggttggtactgtaccacgggaaacgcacgaccaaaagattcgtaatggatcagtagcacttcattgtcatccgtggatttcggcatgatctatgccctggagggaacgtattctgttattagggttgtccagtctcaagccagtcaaatgtgattgaacagctgttgaggggattctgggagttgtagtttaggtgggacggccctatgctttattgataccattatgggtgttgccaggagctgtacaggcagtttagggtgaagagggtgttgttacagcacaggcagtggggcccttccttgcaggtggagcgcagggtgtctgactccattcacattcccattagggaataaaaaaacactacacaatgtttccatcccaccccaatattctgcgcgcaggactccccggtattctgcgtggccaaccatgtaaatgtcctacaatattgggaacaagtgaatgtgtcacatggtacaacttatggctccacccacttatgaatgtgtcacatggtacaactatataaaggcaacgaggaacatctcatataaattatttgttccccccccatcatataatgtttgtgtcacatggtatgggatgaataaaagaaagaatcagccctcgtaaatagagtttgtcggcactcatttggttatgggagggacagtgccagctgggaggggcttaagcctaaggccactccttcccctgggtggaacagcgtcagtcacgtgacatgaaagcaaacagcctgctctgttgactcggatgtgtcacgttatatgaaataatatttttggtaaaggttataatttattttgatgtagatcttattctttatagagcttgaaacggttaattgtacatttgtgctcttggtttctgtctgttttgttggatttttttttatctcttctcttttcttacataaaagaattctacttgataatccaaaaaaaaaaaaaaaaaaaaa

SEQ ID NO: 248 - DNA, 2303 bp, Xenopus laevis
cacagaccgggcagcgggatggctgcagcttggtttctcctgcttgtgatctcaactgtcagtgccactctgtgcccggatggcagcgcttgtgaggagaagagtctgtgctgtgagaggccaggagaggagaaggggtacagctgttgccctgaggcagaggtcgtgtctcactcgcttcccatgatgctctcccagacctcctgctttgggccctccagttgtcctgatgaatattcctgtgtggagactcctcaagggggaagcgcttgttgtccattgactgagggtaaatcttgccaagacggccatcactgctgctcctcgggttcctattgctcagacgacggacactactgtatcccagcctctaaccagtcggccgtcgtctgtccggatggaagatctgaatgtcccgctctcaccagctgctgcctgatgtctgacatgtcctcctgggggtgctgcccaatgccacaggcagtttgctgtgaggatcacgtacattgctgtcctcatgactctcagtgtgacgtcacacaaggccgctgtgtctccagacaggaccacgtcccctggatgaacaaactccctgcccgtgtgcggttggtcggctttggagatgaagaacgattggttccttgtcctgatggcacttcctgtccagacggctccacctgctgtgaaaaagttgaccacacgcatggctgctgctccatcttgtctgcagtctgctgctccgatcatcttcactgctgccctggtggtaccacgtgtgacctggtccataagaaatgtgtgtcccgaaatggagagggccccttgttgcgacagatgccagctatccagcaggattcagccaatctggttccctgtgatgtcgccaccacttgcccaaataacaacacctgctgccgcctggcatctgggaagtggggctgctgccctatagagaaggccgtgtgctgcaatgaccataaacactgctgtcctgaaggctatacctgcagcctgggcaaatgctccagagaggaacactccatcccttggctcctcaaaactccagctctgacccataaagccggagatgtaaagtgtgacgacatgtacagctgcccagatggacaaacctgttgtctcttggcatccggggactgggggtgttgccctatagcgcaggcagtgtgttgtgatgaccatgagcactgctgcccccctggatacacctgctctgagggagactgccagaagggggcgctctccatcccgtggctcggcaagactccagctctgaaacaggaggccggagatgtaaagtgtgacgacatgtacagctgcccagatggacaaacctgctgtctcttggcatccggggactgggggtgttgccctatagcgcaggcagtgtgttgtgatgaccatgagcactgctgcccccctggatacacctgctctggatcacagtgtatgagtggggggctctccatcccctggctcagcaagactccatctctgaaacaagaaggtaccacagtgaaatgcgacgactctttctcctgtaatgacggacaaacctgctgtcgcatgcagtctggggtgtggggatgctgccctatagcgcaggccgtgtgctgctcggatcactggcactgctgcccccagggctttacctgtgatacacgtggcacctgtgtgctgggccggctcaatctcccggggctcatgaaggtcccggctctgtcctctgatggcaactggtgtgacgaaagccactcttgcccatctggtaccacctgttgccctggagaagggggaggctggagttgttgcccactgcaggaggcggtttgttgctctgatcatcagcactgctgtcccactggctacacctgtaacttggctgctggtacttgtgacttgcccccccaaaaagctgcaaagatttcccccagtggaacctcagctcagagactggattatgtctggtgtgatgctcagacttattgctctgatggacagacgtgttgtcgaggacttggaggcgcctggaactgttgtgtttacacttggggtgtgtgctgcccagacatggtgcactgctgtccctatggatacgtgtgtctgcaacacggagcatcatgtggccgatcaggaagccctcgctgggacggaaaactctctcctctcctatgaacggacgaagcagttgcactctattgttacttctaatgtcatccttgtaaaacactggaataaaatcatgttttatatatttaaaaaaaaaaaaaaaaaaaaaaaaaaaa

SEQ ID NO: 249 - DNA, 2343 bp, Xenopus laevis
accaaaccataaatgcaaggggcgacttgtttttgatctggtgaatttactgggatgcattgtttttataaactgctaagtaaccgtggcaccgtgtatatatacatttaaaacgtcattctttattttattctgtagaccagaaatagcttcgatcgcggagcacacgcaataccccgagaatatttttggtgtgatccaatgtggcggaggcagcgtgggtagttggggactgctaggagtttatggcgtgttggtgatcttgtctgacagctctccgtgtacatttcagaatgcctcaccgaaagaagaaaccatttatagaaaataagaaagcagtcacctttcacctggtgcacaggagtcagagggatccattagccgctgatgaaactgctcctcagagagtgttgttgcctgctgataaggcagatacagaaaaacgtaaagaagaacaaagagattttggggttttctttgacgacgactacaattaccttcagcacctcaaagagaggggcccttcagagcttattccctcagcgaccagcaagtcaaagagctgcattatcactgatcaggatggtgacaaggaaaaggagcctcagcatgttcccggaccatcaataaatttaccatcttccgtgtttgcttctgagtttgaggaagatgttggattgttaaataaagcagctcctgttcgaggtctatgtcttgacttggatccagatattgtggcagctttggatgaagattttgactttgatgatccagagaatcagttggatgatgactttatcttacaggctaatagtgatgacctccggagatcatcccatgaaaaagatgatgatgacgatgactgggaggatgttgagagtgggagtgaggaaaatgactatgattcagatggaactgtttcagatgaggatgatggggagggtgatggtgccagaaaagagtttctgtttatgcaagaggaaacgaaaagtcgttttacagaatattccatgacatcatctgttattaggaggaatgagcaactcacccttcttgatgaaagatttgaaaagttttatgaacaatttgatgatgatgaaatcggagccttggataacacagaattggaaggattcattgactcaaacagtggtcgattggaagaagtaataaatgattactacaagcaaaaagcaaaagactgtgtgaaactgaaaaacctaacacctagagatggtatggattcagtcactgaggaagatgacgaggacaaagaagatatgcaaactatagttattgaggagcccagagaaaagtgggactgcgaatctatcttgagtacgtactctaacttatacaatcacccacagattatcaaggatccacccaaggcaaaactaatacgcgtatctgtgaaaactggtattcctatggatgtccttcctggaaggggactcactgccaagcaggttgaacgaatggaaatgattaacagtagtgacatacctagggtgtcaacacatccacgcaaggatgaatcaaaagaagagcgcaaagctagaaaacaagccattaaagaagagcgcaaagaaagaagagtggaaaagaaatccaataaactggcattcaaagaagaaaaaagcagacaagtaaaagagcagcttaatcttaaacagaatcttcaagggctcaagctatcttaacaaaattgttaactggagctgcccctttacgactatgaagaagaggagactgacaccaaattatcataccagcacgaccaacacaatttgcattgccagtgctgaaacagaatgctgaactgtattcagcaaaaaattcctttcagaagaagatacaatagggattgtaaaaaaaaaagagaatttcgataaacttaatttactattttaatataaaactgtacattatccttaatatggattgtgtttattgccatttgacatctatcaaacatgatccttatacatggccaagtgaataaatgtcccttcatctttttatgtattaaatatatttttggtttggcatcttctagcattatatcttaatagtggaggtcaagaaatctcagtaagtaatctctaagtaagattcaggggctggaaaatgtaaagagggatgaaaaaaagatctgtttgatcattacaattttgtggtcacaccacctaaataccacacccattttacaaaatttgggcaggttatggaaaggttacaacacatttctgggacttttagggtcatgttgtatgtattataataaatagttctgctaataaagtgtgagtccctgttccaccataaaaaaaaaaaaaaaaa

SEQ ID NO: 250 - DNA, 5782 bp, Xenopus laevis
acatgctgcagctgcactaaccgggcccgccattatctgccgcaatgccggtctacttccagcgccccgagaacgccctcaaacgggccaacgaattccttgaggttggtaagaagcaaccagctctcgacgttttatacgacgtgataaagagcaaaaagcaccgaacatggcagaaaattcacgagccgattatgctcaagtacctggagctgtgcgtggacctgcgcaagagtcacctggccaaggaaggcttgtaccagtacaagaacatttgccagcaggttaacatcaagtcattagaagatgttgtccgcgcttacttgaaattggccgaggagaggacggagtcggccaaagagtcttctcagcagatggtgttggacattgaagatcttgataatattcagactccggaaagtgttctgctgagcgctgttagcggtgaggacacccaggaccggacggatcggctgcttctgactccttgggtgaagttcctttgggagtcgtacagacagtgcttggacctgctcagaaacaactccaaagtcgagcgtctttatcatgacatcgctcagcaagccttcaagttctgcctgctctacacccggaaagcagagttccgcaagctgtgcgacaacctccggatgcatttgagtcagatccagcggcaccataatcagagcactgccattaacctgaacaatcccgagagccagtcgatgcacttagaaaccaggctggttcagctggacagtgccattagcatggagctctggcaggaagccttcaaagctgttgaggatatacacggccttttcgccttatctaagaagccaccgaagccccagctgatggcaaattattacaataaagtctcaacggtgttctggaaatctggaaacgcactgtttcacgcctccaccttacacagactgtatcacctctcccgggaaatgagaaagaatctgtccccagaggaaatgcagaggatgtctacgagggttttgctcgctacactctccatccccataactccagagcgcacagacatcgcccgtctcctggatatggatggcatcattgtagaaaaacagcgacgcttggctacattgctgggactacaatcaccccccaaccgtgttggacttattaaagatatggtgcggtttaatgccctgcaacacgttgttcctgaggtgaaggagttgtacaactggttggaagtggatttccacccgctcaaactctgcacccgtgtcaccaaggtgttggactggataaaagaacaagccgagaaagagcccgagctgcagcagtatgttcctcagctacagagcaacaccgttctgcgccttctgcagcaggttgcacagatctatcagaccattgagttctccaggctctcctcccttttgccctttgtcgatgcctttttgctggagcgtgccattgtcgatgctgcaaggcactgcaacttgcaagtccgtatagatcacacttctcgtactctaagctttgggtctgatttgaattattccacacgggaggatgcacctgttggacctttcctgcaaaacatgccctctgagcatatacggaaccagcttactgcaatgtccactgtcctctccaaggctgtagccaccattaaaccggctcatgtgctgcaagagaaggaggaacagcaccagatagcgatctctgcctaccagaagaattcccgaaaggaacaccagcgtatactgacccgtcgccagactatagaagaacgcaaggaacgccttgagaacctgaacatccagagagaaaaggaagagcatgagcagagggaagcagagctccagaaagtacgcaaagcagaggaggaaaggctgcggcaggaggctaaggagagggagaaggagcgcattttacaggagcatgaacaaatcaagaagaaaactgtgcgggagcggctggagcagatcaagaagactgagtttggagccaaagcttttaaggacattgacatagaaaatcttgaagaactggatccagacttcattatggctaaacaggtggagcagttggagaaggaaaagagagagctccaagaccgtctgaagaatcaggagaagaagatcgactacttcgaaagagcaaaacgcttggaggaaatcccactgctaaagaaagcctatgatgagcagaggatcagtgacatggagctgtgggagcagcaggaggaggaaaggatcagcaccttactggtggagcgagagaaggcagtagaacacaagaacaggatgtcgaggatgctggaggacagagactcgtttgtttctaatctcaaagcctcccgccagtcagtgtacgatgcaaaactgaagcagtttcaggagcgattagcagaggaaaagagagtgcgtctggaggagagaaagagacagcgcaaagaagaaagaagaatctcttattacagagataaggaggaggaggagcagagactgatagaggagcaacttaaacaggagcgcgaagaccgagagaaaatagagaatgagaagcgtgaagctgaacagagagaataccaagagcggctgaagaagctggaagaacaagaacgcaagaagcgcctgcgagagctcgaaatagaagagcgggaaaagaagcgagatgaggagaggcggggccccgatgattctttcaggaagcaggatactccttctcgctggggagatagagaggaaagtggatggagaagaggtgcagacccagatgaacgcaagcaagctcctcctgaaagggattggcgtagcggtggacaggattcaaagccagtgaaagatgaagaccgtgaaggagatgaagattccgttttgagaaaggatgaagaacaggtggcacggggtgatggtgatgaagaacgggcagcttcttggcgtggtacagatgatcgtggtccaaaacgtagtgttgaagaagatggaggacccagacgtggttttaatgatgagccaggccctaggagaggatttgaagatgaccaagggccacgccgtggcttggatgaggaccgagggccacgccgtggtttggatgaggaccgagggccacgccgtggcttggatgaggaccgagggccacgccgtggcttggatgaggaccgagggccacgccgtggcttggatgaggacagagggccacgccgtggcttggatgaggaccgagggccacgccgtggcttggatgaggacagaggtccaaggagaggctttgatgaagacaggggcccaaggagaggctttgatgaagacaggggccctagacgtgactttgatgaagacaggggtcctagacgtggctttgatgaagacaggggtcctagacgtggctttgatgaagacaggggccctagacgtggctttgatgaagacaggggtcctagacgtggctttgatgatgaccgtgggccaaggagaggttttgatgatgatagagggcccagacgtggttttgaggatgacagagggcccagacgtggttttgaggatgaccgtggcccaaggaggggctttgaggatgaccgtggtcctcgacggggctttgatgaggaccgaacgcctcgtcgtggttttgaggatgatcgtggaccaagacgtggcatggatgaagaacgtgtatcttggcggggtggagccgaagaggaccgaggaccaagacgtggagctgaagaggaccgaggaccaagacgtggagctgaagaggaccgaggtccaagacgtggagctgaagaggacagaggtccaagacgtggagccgaagaggacagaggccagacaccatggaaacccgttgtaacaagtcgcccagcttcagggggttggcgagagcgagaaaaagcccgggaagatagctggggcccatcccatgattctaagccgcctgaagagcgtgattggtctaagagaggagaagatggcgaaaaggattctgagcgagacaggcgcccagtcagagaggaatctgcatggcgacgggggggagatgataacgtaacgccgagaaaggtctcaccgggcgacaagagcacagaagacagaaaagaacccagtgatgtgagacgagcagcacctaaaacagatgaaccgagccaatggcgacagggcgaacaaaaagacagccagcaagaagagcgcggcaccccccgacgagttgctgcggcagacagggaaaaaccctcttggcgcacagaaaagaaagaggaaaaagacgcccctcgacgccccaaacttgaagaagatgaggacgggtggacaacagtgcggcgttaggtagctctaatctgattggtcaggcttggtattgtgggttagcgttgttcttccattcaaatattcccaacattgtgtgtgccctaatgtgattctctgcatctctctctgcttctatacctgagggtcactgaccccatgccttcaacttgtctggtgcattttatatgaattctctagaggatgcagcagtaagatctgccctttattcccattattcagcaagcggggggggggggtcctagaggtgtctggactgtcaaacataaaatattcccacctggagaacttgtagaggctcgtgtggccctttaaaaccacattgcaggagtttttttctactatggtccccctactccatatattctgttcaataaagcagttctgagctctgcagctcctatttatctcaatccttttatctgattggtgctgcccttaccctgtctctaaatgtgtacgatacgaaaagccattggacagcggcattaggctctgtcattggttagtagtgtccttgacttaaccaggacccaataaatacactcagctctttttgtggcctacaatgggtcagataatcctattggttaataagtttaatgacgaggcccatacccctcccattccctgaaacccaaatcactgttttctgaagtgacccaagagaatattgggatatctgaggccattttggtctgttagaggccactgcttccgattggacagccctgctgcactgtattctaaccttccgataatataatggatgaaccaggcccacaactgccctcgccaatgaaacactagagcatcattagcaaggcaacagtctcaaccaatcaaaatgaatgaagggttttctctttcaggtgcatggactttgaatgatacctgtataataaaatgtaccaggttgaaggctgatgtctgataaccataacctgattccgaacacagaccctccatatcgctgcccataacgcaaagcctgttttacattttgttttttttatgagtttgtaataactgaccctttacagataaactgtgctttgctacatgcatgcaaaatgtgcagcccgcagctgtagaactacaactcccatcatcccaccattttaacactggctgctgggagttggatgttcaaccatagctggggggaagggagctgcatgttaacggtgacattttgggtgacattttgctatgactgcctcaataccgatttttttgggggttttttttcccctagtctctactgaaatgtcgtatttaaataaagcaatttgtagtagaaggaatttctctctcttttctctcctcataaaaagctgcgttactctgtcaggttaaaggaacacccggttgtgctgtatggcaacgtatttaggccaacacaggacttgttgctgcttattgtatggaaaataaagtacttatacaaaaaaaaaaaaaaa

SEQ ID NO: 251 - DNA, 3983 bp, Xenopus laevis
cgtgacccagttgctgactctctggccgtcttccggagctctaataactaagctgctgcttcacttcttggactgacgttaccaacatgtctggcttgagtggcgcaccgtccacttccagcaccagcttgacctataaccataaccacagtggcggaggaggggcagattctatcgaagtgggacaagacgcgaccccaggtgccaactccacacagagtgtcttcgggttgttcagcaccgacctgaaaaagaatgaagacctaaagcaaatgctggaaagcaacaaagattcttccaagctggaagcaatgaagaggattgttgggatgatttcagatggaaaaaatgcctcagagctgttccctgctgttgtcaaaaatgttgcgagcaaaaatcttgagataaagaagctggtgtatgtctatctcgtacgctatgcagaggaacagcaggacctggctctcttgtctattgctacttttcaacgagctttaaaagatcccaaccagctgattcgtgcaagtgctctgagagttctttcaagcatccgtgtcccaattattgttcccataatgatgctggcaatcaaagagtcagcagcagacttgtccccctatgtaagaaaaactgcagcacatgcaatccagaagctttatagtcttgatcctgatcaaaaagaaatgttgattgaagtcattgagaagcttcttaaagacaaaagtacgcttgttgccgggagtgtagtgatggcctttgaagaggtgtgtccagataggattgatttaattcataagaactacaggaaactgtgcaatttgctggtcgatgttgaggagtggggacaggttgtgattatccatatgctgaccagatacgcccggacccagtttgttagcccctggctagaggacggagattcgggggagatgactataaaaagtttttatgaatctgatgaagaaaaagatgctgataccaaccaaaaaaggccgtatgttatggatcccgaccacagacttcttttaaggaacaccaaacctttactccaaagcagaaatgctgctgtggtaatggctgtagcccagctgtattggcacttagcaccaaagtcagaaaccagcaccgttgccaaatcactgatccgccttctcagaagccacagagaggtacaatacattgtgcttcagaatattgcaacgatatctatccagagaaagggtttgtttgaaccatatttaaagagtttctatattcggtctactgatccaacaatgatcaaaacactaaagcttgaaatcatgacaaatttggcaaatgaagcaaacgtatctaccctactgcgagaatttcagacctatgttaaaagccaggacaagcagtttgctgcagccacaattcaagcaattgggagatgtgcaacaaacatttctgctgtgactgacacttgtcttaatggcctggtgtacctcctgtctaacagagatgatgctgtagttgcagaaagtgtggttgtcattaagaaactcctgcagactcagtcttctcaccatagtgacatcatcaagcatatggccaagctcttcgacaagattactgtcccaatggcaagagccagcatcctgtggcttattggggaatactgtgagcgagttccgaagattgctcccgatgttctgaggaagacagcaaagagcttcactaatgaggacgaccttgttaaattgcagatcataaacctggcagtaaaacttttcttaaccaactccaagcagacaaaattgctcactcagtacatattaaatcttggcaaatacgatcagaattatgatataagagaccgtacgcgctttgtaaaacaacttatcgttcccaacgagaaaagtggacctttaagcaaatacgcaaaaaagatatttttggcaaagaaacctgctccggttcttgaatcttcatttaaagatcgagaacactttcagcttggcacactttcacacactcttaacactaaggcatctggttatctagagctgtcagactggcctgaagttgcccctgacccctctgtccgaaatgttgaacctagtgagccggttaaaaacaaggccacaaagctggaaatggcaaactcagagaaatcctctgacaaattctactccgattcagagcaggaagagaaagaatcggaggaaagcagtgaaactgaatctgaaagtgaagaagacagtgataatgagaaggagagcagcagcgagcaaagcgatgccagttcctctgctgaaagtgagagtgaatcagatgaaagctcctcaaaaaaacagaagaatggaaaaaagaacagtgactctgcagaggaaaagaagggtcctggtacaagaagtgaagcgtcgagtgcatcctctgaagatatctcggaatcggcatcttctgaatcaagttctgaatccgaggaagaaagcggttcggaaccagaaccttccaagaaagtaacgaacagtaagaaaactgaaagcaaatcagccaaacagaaggaaatccctagaaaaaatgaaatgtctctgctcgacctagatgatttcaacgtgccagctgttgttgcaaaacctagcatactttctcccagtttactgtctgatttacaaggcttgtccctctcttcctcatctccagtaataaatatttgttcgccctcctatgtcccatcgaagacacacgaactccttcacagaatgagtgggaagggcctatcagcacattatcactttccaaggcaacagtgcatttttggtgcacaaatggtctcagtgcaaattacctttaaaaatactacagacaagaaaatagaagctattcacatagaagaaaaaaagatggccgctggagtaaagatgcatgcgtttaatcagatagattatctggagccagagggatccattacggtctcaatgggtattgacttttgtgattccactcagactgccagtttccagttgtgtacaaaagaagaccagttttctgttggaattcagcctccaccaggggaacttctgttgccggtgtctttgtcagaggcagatttcaagaaagaacaaggaaaactaacaggcatgaatgaaagttcagatactattgttgtaaactcatcatattccacacctcagattatagtccaaagatttctacaagttgcgaaccttggggtcgttgcctcaggccaaaacaacattcacagatttgcagctaaaactgtgcacagtgggtcgttgatgctggtcacagtggagctgaaggaaggctcgacagcacagctcatcataaacacagagaaaacggtgattggctctattctgctgcgggagctgaagcctgtcctgtcccaggggtaaccagcttacatctggacttcagagtctggcacaaaacaaaagtgcttggcatctactaccgctgcctttcatttataataatagctcttccatctgccagcagtggggagaatacactctggacaatcttgtctcctgctttagaatgttagtatctatcatgtatgcaggcgctagtgatagttctgcttgctaaccaaaaatcagatggttctctgtcaggtgcctctgctattacaccaatttgccttttggaaaattgccttgttataggaacgttctatttcagtggggggagaacaatgtaaaatattcaggaaatataaactacagcctttaaccagaggggaaaaggatccaattcacattctttaaagccacggcccacgttgctctttccaatcctgagactaaaatgaatggcttggcaagagccggccagatggcagccagttcttcatccatctttttaaaaatccctgcacttctgatgattatatttgttggaaatcattgttcagtgttcagtattgttgttcaggtatttcaataaatttgctatcaaacaggaaaaaaaaaaaaaaaaaaaaaaaaaaa

SEQ ID NO: 252 - DNA, 1103 bp, Xenopus laevis
ggaaaacacagataaatagagcaggggctgtttcacagcacaacacagagagctgatcctttgtgcttccccaaaaatgggggtcaaatttagggggctcttaatgctcccgtgcatcctggctgcatttatccatgcacagactgatgtggaccagaaatcggtggattgttacagctccgctgatgggtccatctatgattatggggctactacattagacgggagtcagttcatccctttcaaagcctaccaagggaagtacctcctgtttgtgaatgtggccacattctgaggtctgaccatgcagtaccaagaaatgaatgcactacatgaagaattaaaatccaatgacttcgttattttgggatttccttgtaatcagtttgggttgcaggagcctggaagaaatgatgaaattcctttgggacttaggtatgtgcgtcccgggggaaactttattccaaacttccagttgtttgaaaagggagatgtcaatgggcggaaagaacagaaattctacacttttctcaagaactcatgcccccctgttggtgacacctttggaaacccagctttcagactgaattgggaacccctaagggtcaatgacatcaagtggaactttgagaagttccttgtgggaccagatggccgtgcagtgaaacgctggcacccccgcacctctgttgcccaagtgagaagagagattgtgtcttacataaagttacagcagggaacgcaaagacttcttatgcttggactggagcaaaagtaaaatcattacagtgatgttcttgtagttcaatccatgtttgctgtgctcatgtatgtgttttgaatggtcagttggagatccaagggaatctagaagctatctgtatgaaggccaagtcaaaaagcattcatgtgtgggacttggctggaaaccagtgctggggcagatgctacttagtgcattcaggcatctgtgccaggctgggatgggcttcatagtgttacccttagctcccaactttcctattgaacactagaatggaatgtaatttgtgccaatagtcaataaaaaacatctgtttgtaaacaaaaaaaaaaaaaaaaaa

SEQ ID NO: 253 - DNA, 1235 bp, Xenopus laevis
cacacaggcagggggagaaggaacgttgctcagggcgcttaaaaggattgtaaaaaaacatggatagcagaatgaatgaggcgaaacaggctctcaaaatcctgcagcagcgctacaagctcttccaacagcaacaagtcacattcacaaccgctctggagcgctgccgtgaaagcgccctcgacaggatccaccctgtgagaactctggcccaggtccgcaaatacctggacgtttcttgcaacaacagcaccgataggcgcgttctcacgttgttcctggacatctgctcggatctggtagatatgtgcacgaagctgcatgaactgcagcccgagaatgcggcagcaacagctctcctgcatgcttgtgtggatctgctgagcccatccaatgacttatccggtctgagagccaaatacccccatgatgtcattaaccacctcagttgtgacgaggcaagaaacttctacggtggcgtcatcagcttgattcccatagtcctagacaaactcaaggaagccgcagcagagctggacaagccagggccacaaacgcatcgcccaggaagtggtcagaaacacttagaacataatgaaactaaggctgccaatgataaagaagccaccggggttcagactgtggtcagacagcaaactagagccaccaaaaagaaatcctatatggagtcactgaaaccagcctggagaccaacaggaaggttctacacttcttgaataatgatccctccacttggtagcacctgatcccaatttcaccaggcttgtttcatcattaggcttagaaactgtgccgaaccctggtgtgctttgatgggactatactaggacagatggggtaggatttattaaaagatggtgattatttggtgtaattaaaatgccagctttgtaccttacaggacaaggaagcttaaactcatggagggagtcaagttattaggtccctcactaattgtagactttcttttctgcttttgtgaacccccaatcaaaaatataaatgtgggacctgatgataactgtccttgtatatgccctctgttaaattaatgtataatgtcttttcaagaatgtatagtatattgtgtgtgcacaacacttgttttgttttttgtatatctgtatttgcacattactgtcctatgcatttgcttggtttgtaaagtgggggtgtttataaataaagactttaaactaaaaaaaaaaaaaaaa

SEQ ID NO: 254 - DNA, 1310 bp, Xenopus laevis
caaccgagctgctgaaacatgtggaacaaccacggtggatttgatggagggtatggtggctcaggaatgggaggaggaggaggttatatgcagtctccaggaggctttgggtctcctgcacctactcaaggagagaaaaaatcgaggtccagatcacagcaaattgtgccatgtacagtgtcacagctactgtcggcaacacagaatgatgaggtgtttcgaataggagaagctgaactttcacaggtcactatagttggcattgtcagacatgcagaaaaagctccaacaaatattctttacaaagtggatgatatgactgcagcacccatggatgtcagacagtgggttgacacagatgaggcaagttgtgaaaatatggtggtacctccagggagttacgtaaaagtagctggtcaccttcgttctttccagaacaagaaaagtgttgtagcatttaagattgctcctgttgaagatatgaatgagtttgtttctcatatgctggaagttgttcacgctcacatggccatgaattcccagggtgcgccttcagggggtggatctacagtggccctcagtacacctggacgcgttggtgacagtggcagagcattctcaggaggaaatgacaatccgacaaatgggctgacaccacatcagagccagattcttagtttgatcaaaagctgcaaaggaaatgaaggcatggcatttgaagaactcaaaaatcgacttcatggaatgaatgttaacacaattaggcaagctgtggaatttctcagcaatgaaggacacatttattccactattgatgatgaacattacaaatgcactgatggagattaacaaattgtttcatttgttgttttctataacatcagcttcagttgtagaaactattgaatttatatgctaattatgtatataggcaacgagcccttcatttttacttaactgtaggctattagaaagcaatgcacttcagaaaagcctaatgtaaatatacgtttttggaaagattaagattaatcttaatctatacgttgactgttttcaggggggtttgaaagatgacatttggtgagagcagtaatttttgatacaaactatattcttgagttctgacaagtgacatttaaaatttgaatatttattggcacattctgtcagaatttcttggtacagaaattacatgtctgtgggaaaaaaagacaactgagtttaatacattttactaactgtattttgggaaatatatgtgtatatcgtaattaaagacttccatccccaaaaaaaaaaaaaaaaaa

SEQ ID NO: 255 - DNA, 2635 bp, Xenopus laevis
gttatggacagtcgtatcattaccccggggccgtaccgggctactaaactgtggaatgaagtaacaaaacattttcgggcagcgatgcctttgaggaaacacaggcaacacttcaaagcctatggaaattgctttacagcttctgaagcaatagattggctccatcaattgctaaaaaccaatagcaattttggttctgaggtgacccggcagcagaccatccagctattgagaaagttcttgaaaaaccatgtcatagaagatctaaaaggcagatggggaacagaggaactggaggacaacaacagcctttacagattcccttccacatccccagtcaagaccattccaagtcgtcctccattgtggaaaagaagcagcttggaaaatgtatttaaagaaaaagaacacttgttcaagatgcctcaattctctaagaaaacgcctaaaaggcgtgcgtccgttgattctaaggaagagcaagaaaatgaggacctgatggaagaccaaaggaatgatgatgactttcctaagcagctgagtagcaaggatattgaggacatatggggaaacataaccatgatacaccttcaaaaaatactaggtttgccatccttggaagaagtcttaaatcctgctcagataaagcctaattatataaggtataatatgacaaataccagtaagcatggagttgttgtccttcaagataaaacagatgaccttcctcattgggtcttgtctgctatgaaatgccttgccaactggcctaagaataatgatatgagtcaggcaacctatattggctttgaacgtgatgtttttaggacagttgcggactatttcttaaatcttccagagcctctgctcacatttgaattttatgagctttttgtaaatatcttggtggtctgtggctacataacggttcccaacagtcataatggaaagcatagatttcataataaaacccgtgatccagcaccagctaaaaaacagcacttaaatgatgaacaatttttcaagtcaacagaatgccttcttttaagtttggtacggaaggttcctaatgaagaggaggatgatgttgaacatagttttggggagattgccagagacaacaaagaccatatccctcgagatgtatttgctaaaaagaatcatttgtatggttccttcagtagaagagccagtaggggaactattggggggagttgtcaaaatctttccacttccaggaaggaaactggtgtgacccgcaaagtaagggtacgtagctgctccctggaaggaatagctgatagtgtgtccacagacgtcagagactgtcagagcaacattttgcaaccttcttcgcagaagccagaattcagtgtggtgaaagaaaggccaataacatttggaaaccaagctgaatctgtgactggccttaatgcttctgaacataaactacactataggactagtgatgggggctactcccagaccagtgaaaagcttgctagatcagtgagcgtgggggactgtcttgagtctcgtacaagtaaaaatgcaccagttgctgagatcactattaaacctttaaaatctaaacaaacgagaatgcaaaagcgtttttctcctacggacaacgaacctacagatctggatttcaccgtaacaaagagattatgtcagagtaccatggaactctcacattcttcttttccttcaacttcttctttactgccacctactacttcccccaacagcactggctcagaaagtttgttgcagccacacttggagaaagttgcaattgaggcgctacaactttgctgtctgctgcttccccctgccaacagacgaaagctccagctgttaatgcgcatgatctctcgcatgagtcagaatgtggatatgccacggcttcatgatgccatgggaactagatccttgatgattcagacattttcccgatgtgttttatgctgcgctgaagaagtggatctggatgaattgcttgcttcaagactagtttccttcctcatggatcatcaccaagatatcctacaagtgccttgttatttgcaaactgctgtccaggatcatgtacagtaccttcaaagaccccgtgtgaagcaaggaactgtgccagaatactatttttgtaagcagataagtgcacaagagtttgaagagcagagattggccacctctcaggcagctataatggaacttttagaaaacattgtaagagacaaagctttagcagttaaagacaagaagaagaagctaaagcagtttcagaaacaatacccggatatctaccaaagccgatttccaactacagaaagtgaagccaaattgtttggcgataaacctacaatcaaacaaccaatgttgatgctgaagaagccaaaattcaaaagcttacgctattgattagaaaatacacacatttaaagaataactgcctatgcaaatccagtacctcccttttctgtactatgaactgtatatctgtcccactgtaatcttcctctattgtaaatcatgggtacatatgagttgctgcttgtaaatacctgcctatagtagttatatgccactgcctagtgcctttgaacaggtgatatctaaaaaaaaaaaaaaa

SEQ ID NO: 256 - DNA, 4048 bp, Xenopus laevis
cccacgcgtccggtgcgtgttatgttttcgcatctggttctttaaaggggccgtgcagaagcgagcctccctgttcttcccctcctcctccggtgacctcaccaactcaggctgcagctcggatgaggaggggagcagagagtttggtgagcccatctggcgctgaagtgtaggggggcgttcaggcagcacccgagtgtgtccttgtcccgctggtgctgtggagaccccggatattatatgtcctttgtggcctttgctaaaggtttccttgcggctgccgcttccacacttttcctccgttccctcttccgtaagccatggccagcggcagcggcagtagcagtagtacgagcagcagcgctctaagcgggcgtctcccggggtcccgcagcgctaacccacgaaaggcccgtatactcggcttgttcgatgccatccaggatgccgtgggacccccgaaacaggcagcggccgacaggaggaccgtggagaagacctggaaactgatggacaaagtggtaagattatgccagaacccaaagctacagttgaagaacagcccaccttacatacttgatattttaccggatacgtatcaacatttacgactgattctgagcaaatatgatgacaaccaaaaactggcacaactgagtgaaaatgagtattttaaaatctacatcgacagcctaatcaagaaatccaagcgggctatgcgtcttttcaaagaagggaaagagagaatgtatgaggagcagtcgcaggaaaggcgaaatcttaccaaactttccctaatatttagccacatgttggcagaaataaaggcaatctttccaagtggccagtttcaaggtgataatttccgtatcacaaaagctgatgctgcagaattctggaggaaattctttggagagagaactatagttccatggaaaatattcagacagtgccttcatgaagttcatcagattagctctggcttggaagctatggctctcaaatctacaatcgatttaacatgtaatgattatatttctgtgtttgagtttgatatctttacaagactatttcagccatggggctccattttaaggaattggaactttttagcagttacccatcctggatatatggcattcctcacatatgatgaagtaaaagcccgcttacagaaatatagccttaaacctgggagttacattttccgactgagttgcacaagacttgggcagtgggcaatcggctatgtaactgctgatggaaacatcttgcaaacaatacctcataataaaccgttgtttcaagctctgattgatggcagtcgagagggattttatctttatcctgatggaagaagttataatcctgatttgactggtttgtgtgaacccactccacatgatcatataaaagttacacaggaacaatatgaattatattgtgaaatgggatccacgtttcagctgtgcaaaatctgtgcagaaaatgacaaagatgtaaagattgaaccttgtggacacctgatgtgtacttcctgtttaacatcgtggcaggagtctgatggccagggctgtcctttttgtcgctgtgagattaaaggtatggagccgataatagttgatcctttcgatcccagagatgaaagccggtgtttcagttttagtgacagtctgtgtactcctatgttggactttgatgatgatgatttgagagaagaatgcttgataatgaatcgactagctgctctgagaaagatgaatgaacgacagaactcaccagtgacatcgccagggtcttctccactctcacaaaggagaaaaacaccccctgaaccactgcagataccccatcttaatcttccaccagtgcctccacgattggatttgattcagaaaggcttagctcgctcaccatgcgctagtcctactgggtcaccaaagtcatctccatgtatggtccgaaaacaagataaaccacttccagcaccaccacctctgttaagggagcctcctccacccccagaaagaccacccccaattccacctgacagcaggacatgtagacatttacatcatgcagataatgtgccttgtagagaccagtctacaccacatgaagcctggtgcacaagagatctttcaggtggcaatccggctagtgtatgtcgtgtaacacatgatggttcaccaaaactcggtgtaccttctagctctgttttaaatggaaggcacagtcgaatgagtactgaagctggatttatgcgtcataaacatcataaacgtcgtgaatcgccattagaaactcttagggtttataatggtctttcgggaaatgaagaatacgatgtgccaccccggctttcacctccaacaattactatccatcccattgttaaatgtcctgtgttagtgaattctgtatctgacaaagtgagaaattctgcagaggaagatgactgtgaatataaaatcccttcatcacaccctgtgtcctcacggctgcctcttcactgccatagtattaagcattttcctagactgtgtgaaaatggacagtgtttgtcaaatgggacacacaatggcatatctgaaataaaaaaactgaaaccaccagatcaaggtgatgtcattgccaccagtactgtacccatccattttcctccagcacgaacttcagcgagagaaaaccacccacatggttcttctcttaccaggactccatctgattatgatcttctggttccccatccaggtgaagagtcttttgacatttcccctccctcgcagcccccaccacctcccccagcacgcacctgtgtcactgagcatgtaatgcccactgcgttgggaagcagaccgaattcagacgtggatctgttccttcctcattcggatccttgcccagaagccccgttaccaccagcccgaagaggaccaggggaagtcaaatcaaacagactttctcaagagtacgatcaacttccatcatgtccaggtaaaggccaagagaaagcaagtaatactaaaggggaactcctgcttccaaaccaaaatttgataatgaggcccacatgacacagaaaaccctaatacatccatcacagttacctgtttcttcaaaaagtatgaataaatgccattttctatgctggtttacagttcttctctttctgcatcatttgaaatcctggcagggaagaagggactaaacactgattttacaaattgtaacaacttctccacagcttacagacagcatgcaggaacccacgtgcattgcactatgatgtttctttccttattgaaatcacatgtgcagggaattgtggggtttggaggatgctggcggaggatagctggctgttgttacaaagtaacagtagtcagccagctcagcaaagtagtcagacagatcagcaggagagctgggggctaggcttagggaactgttgcaaaccattaaaaatcatgaaaagtcttcatattttttaattgatgtatattgaaaagttgcttgaaattatgtttacttttcaaaaagcttaagttatgtttttgtggagttccactttaaaaaatgcctacggcacatttctaaagataattattaatctcagctaattattaatctcagtttagaaaatgttgtttctgttgtattgtattagctttcattgtatgtgggtatacccagcagaatctcttggattcaaaaattcctattcctgtgttgaattgggagggcattatattcaactgacatacctttattgcaatcaaattctatatttactcttgaaagtattagtgttatttctgttttccacatttgcacaccaatacttctgttcatataaataaaataataccaatgtttgcccgattcatgttcagaaatatgtgctaaacgtggaccttagcaggacattcgttaagaggccactagacatttaaccaaaagacaaacaagtaaatattctgtaggtacttgtacggttctcatgaataaataattctttcagaatgaaaaaaaaaaaaaaaaaaaa

SEQ ID NO: 257 - DNA, 3841 bp, Xenopus laevis
gcggtgcggaagttatcttgttagcatgaagggacaagacaaccttagcaatgaaagttatgatacatgcactttcttctaataaagcgcccgagtaaagcggggggttgtgggtaacccgcagcgggatgctcggtcctgggccggccggggctgttgtgtccctgaaactcaccagcactaaggacacttttatgcgtcttacacctgaggtgatcgcacaactgcgcctggaacagaatcatgcagtggaggtgtcatggagtgagcagatgccggtgtatctttgttggatggagagtcggagtggcacttgcttgggtacaaatgtggctgaactgaacagacagtttgctgagaagctcggcttttcacatgggcagcaggtcttcctcaagcagtgcactaatgttatttcttgtactgaggtcacagtcgagcccctgtctgctgatgattgggacatactggaacttcatgcttcagcccttgaatcccgtattttggatcaaattcgaatagtttatcctaaggctatattcccagtatgggttgaccagcatacttgcatttaccttcagattggtgcactgaccccactgtctagttatggcagactggaaccacttacagaacttgtagttgctcctaaactacgagacttagaggctgtttcctcagcacttgtacccccaggacctgaggatttggatattgaatccagccatgtaaaaagtgatcataaaaagagcgaaagtacagacagtcgaaggcaatcaactgaaggaggaagtgaaactattgaaccagatcattcagaaggtttatccagtagcaaaagtatatgggactcagtaggaaattttcttttacgatctctttggaggaaaccaaccctttctgcaagcagcagtgaaacagaacttatggagaaatgtttggttaagaaagttgagttagaagctgtatttagggtatccaatcacatccctcacattgttaaaaacagccaggaatatactgacagtgtgaatgataactgtgttcatgttttctcatggtatcctgagcctcctggtttagtaaatgacattgtagtaacatatggaaccattcaggaacttttatccccaaaaagaaggaaggaaagtaccagaaaaaacacagagccgtcaggaaaaaaaatggacggtgttgctctgggaaacccaaaacagaggaatgctgacaacaaaggacccagtgcaacagtgaaaatagtatggcatggctttgacggtcttaaagatatcattgagtatgatatcaggaatggaaacacacacgttggaaaagtctgggtcccatctcgattgagaaagaagctcaatattaatgtctcctcagctgtaagaatacattcacgtgattgcattctcagactcccggcatcgctcacactacagccaacacaatctttggatagaaacatacataaggacgatatcaaatctgcatttactacttggttgctgtcttctagcactttacagatgccttggattgcagggaaaactggttatatacagatttcattaaaagatgaggtatcggaattcttcattgttgtggataaaacagacttgcaatcaagccaagatgatttttatatgttatgcccaagcgttttggagaaaactacaattcatgtgaattctgagctggcacccacagaagaacctcacacacacctacatacagatcaaaatcttctttacttgaaactgcaaaatttaggaggggtgagtaaactggggaagtcttgctatgatcatgtcgtttgttgtctcatgggaagtccactatccagacagctggttgcatctgcttctggacttcgaagtggaggagtgcttctttttggaccaaagggaagcggaaaatcaactctagcaaaagccttattgaaagaagcatctgagaaactggaatcacatgtagaagaaattgattgtaaactgttaaaagggaaaacctttgaaaatatacttcaaacactagaagaagcatttgaagaagcagcctggaggcagccctcaattatacttttagatgacctggatcagattaccggtgctgtttctacaccagaaatggagcagagttctgaagcatctcaaagcaaacaacttgcatatgttttgaaagacttaatgaagaaaatcatttccatggacactctggtttctgtaatagctacatgtcagtctgaacattctttgaatcctgtgctaatttctgagcaagggacacatcttttccagtgtgttaaagccatcccaccaccaacacaggaagagagatctgaaatgttatgctgtgtaatggagaacaggctaagtacggatgctgctagttacagagaccttgacttccagtatcttgcaagagaaacagagggctttgtagcaagagactttaccatcattgttgaacgcgccatagagtctagtgtgtcaacccgacggattttcaggaaacaagatttggttttgtcaatgactgacttccaaaaagctctgaaaggttttactccattgtccttaagaaatgctcagctacataaaccaaagaagcagggctggaacatggtgggaggtttacatgatgttcgtcaggttcttaaggacaccgttgagttaccagccaagtatcctgagctatttgcaaaccttcccatacgccacagatctggagttttgctgtacggtgcacctggcacagggaagacgctgctggctggtgttattgcacatgaaagtagaatgaatttcatcagtattaagggtccagagcttctcagtaaatacattggggcaagtgaacaagctgtgcgggatgtctttaccagagcccaggccgctaagccttgcattctattcttcgatgagtttgattccattgctcctcggagaggccacgataacactggtgtaactgacagagtggtcaaccagatgctgacacaacttgatggtgtggaaggattacaaggcgtatatgttttggccgccactagccgcccggacttgattgatcctgctctgctcagacctggacgattggatgagtgcctttattgccccccgccagaccaggcctcgagattggaaatcttaaaaggcctcagccattccatgcttttagatgaaaatgtggacttgaagcttattgcctctctgacggatcatttcactggagcggatctcaaagccttgctgtataatgctcagctggaggcgatacacactaacctgtcagcaacccttcctcaggataacaattctggatctgacagtgatatgagcttgtcttccataatattcctgaaccacagcagcgcttctgatgactcgggtggagatcaagacagtgttctagaccagtctttaccttccttggatatgataaagcttcccaccgaagacattcattccagcatgtggcgtctttactttggaagttcatatgattcagaccttggaaactgcagttcagaacaggtctatgattctcacagccaaagggagtccaagaagagtcttctgataaaacagcatcaccttatgaatgcgcttgccagcacaaggccatctgtaagccaagaggactggaagttttttaaccatctttatgaaaactttcaaaacccaaagcaatcgaacagggaaacttggagaagtggacaaaaagtgacccttgcctagcaaccattctgccgactcctgcaaattgtatttaatcaacacaactaatagggttatttgtaattaaatgctttatttttaaaaaaaaaaaaaaa

SEQ ID NO: 258 - DNA, 3760 bp, Xenopus laevis
gtcgttgtattattgcgagatcaaaaccctgcctgcaagtgccgcactaagcagcccagattccctgctctcctccagccatggtcaggaaatctccaggctctggtaaggaggaagacttcaccttcattagccccgtggtgaaatatctcttgatcttcttcaacatgctcttctgggtaatatccatggtgatggtgggtattggagtttatgcccgtcttttgaaacatgctgaggctgccatggcctgtcttgctgtggatcctgccctgttgcttattggggttgggattttaatgttccttatcacattctgtggttgcattggatctctgagggaaaacatctgcctgctgcaaaccttctcaatttgtcttacgcttgtcttcttacttcagttggctgtgggcattgtgggattcatcttttcagacaaggcgcgtggaaaagtaagtgaaattatcagcaatgccattgaacattaccgcgatgaccttgacttgcagaatctcatagattttgggcagaaagagtttagttgctgtgggggcatctcttacaaggactggtcccagaacatgtatttcaactgctcctcagaaaaccgcagccaggagcgctgctctgtaccctactcttgctgcctacatgatgaaggggaggctgtcatcaacaccttgtgcggacagggaatgcaggagcttgactatctagaggcaggcgaatttatccataccaatggctgcattgacagacttgttaactggattcacagtaatcttttcctgctgggaggtgtggccctgggactggcaatcccacaggtaacaaagcatttgagggcaaagttaatttatacatggaggataggtatacaagtgtaatacagtgcattttggaggccatgcaaatatggaggccattaatatcaggctaggctttccactaggcagtgcacatataatcctgcatattggattcctgctaacaagagggaagaggggtgttgtatactggtatgaaattctctacattacaaggcccaagcatggactagtttcagtttccttgtttagcttatgaaattactaacactggatttttttttttgagtaaaggagtagccaaaaataatgtttattgcattcatgtagaacacgtgagtatactttaaatgatgccaccaaatagagagaggcccttgctgaattttgttattgtaatgctttgtaaatgtatttttctatttctttgaaaagctggttggaatcctcctgtcccaaattctcatcaatcaaattcgggaccagatcaaactacagaggtataaccaacagcacaagacagacccttggtactgacagagggccaggtgcatgcgcccaactttgctttaaacaattactgcagcacatctcctggaccaggaaaagtactagcagatttcaagtcacattgattgccacagaaagctttagctttatggaaaaacaaaacgagagctacagtggtgcactatcatttcccagaatagtttccaattgtcttggcagaggctgcattgtggcattttgatttaatgtattttacagagcataacacttcaagggataaagtctgcatttctgtgggaagacattaattgatttacaatatatgaattagtgcagtccaggaggaaaaggatccatattgtccaaacaaggtgtgctattcagagaggaatgttataaaagcttggacttttttatcattgcaatttatatttattttctgatacacaaaagaaatagtttgtaattattgccaagattgttacttttttcttcactgtatactgacagctgtttcagaagactagatgattcttgctatatggagcctttaaaatattctgttatttttataatagaagccacaaaaaaagacacatttgactaaaaccatacaagcaggttaactggttctgtaaagcgctgcaaaatatgttggtgctataaaaatagagaataatagctaataccctaaccctgatccagatgtatgtactgtataaatgtataaagacaacccacacttgtatatctgagctaaggccttgatcatggatcacatcagaattctttctaactgtaccttccaattcaagctaaccttgaaagttcattattcagcctgtcagacgtttcagtcataaacaaatcatttgcaatgaattggagcaagggtgcaccattctcttcctggtaaacccagggtggtcatgagaccatccttgttttttttgttaaaaaaattggctgttgcttattgaggatcattttcaaaaaaccaattaaatgtccactataatttcagcacgtgtttatattgatgaccgttcccctttagtatcacacagtattctcagcataaccgtactcatttgtgtcttgtaaaaaccaatgaaaattcttcaatgtgttttactgcagacaggtcatgctattttgtttttgcagagagtttaggacacaacatgtagtacagagcaggtttagttgaatgtgacaagtattataaagaaacttaaatagtggcttctcaggggcaaggaaaaataatgttcttagaagtaacactattttctcttggtgtagttgggaaatggaaggttgttgtgcacagagagctttgttttcactaatggccataattcccctaaatgcccatttgatgcattcttctttttatgttttatccctggacagactattgaatgtgtatgaaaatattaattcttcaatatcccttctcaacatctttcattacacaaaaatgaatgacttgccatttgcttagtgtgtgccagatgcatcaaagtctgcagcacctgtttatatgcttatgaagatgtagcatcttaactgatggatctctcacacaaagcaacaccctttatcaaactgaaataaaaatacatgacatgctcactaaatagatcatgaatgtctgttacaactgaatatccttactttttgcactttataatttcattttgaagctgaatagagtgcagacttgtgttgtatagagtgcctgtcttattttcttttattctaatagtcaccattgtgcataaatttgagggttgcacaccagatcccagggacgggtataatggtcaaaggcttatgatacaatgaacaattatcaaacgtgtaaattcaaaaatgttgtgattgcttttggaaaaattacaaagaactaaagggaaatgtatctaatatttttacatgtacatgttcaaaatgttggttctgtggttgtgcactgaatatttctgcagtctatatttgaaattatgcagaccatttcatgcaagatcatgtgtgtcttttctttcctgtgctcatttgtagtcattccgtgaatggctttaaatataatagcttttctgtaatagtccccatagataaacatggtcctgtagtctgttacagaagaataggaatgcaccaaatccactatttgtgattcggccaaatccttcgtgaaaagtttcggctgaataccggaccgaatcctaatttgcatatgcaaattattgtcgggaaaggaaaaagtgaaaaaaaaaaacatttttacttccttgttttgtgacaaaatgtcaagtgatttcccttcccacccctaatttacatattcaaattcagatttggttcagccaggcccaaggattcggctgaatacgaatcctgctaaaaaaaaaaaaaaa

SEQ ID NO: 259 - DNA, 2273 bp, Xenopus laevis
gtgagggcatcagcttgaagtcagttggtgtattcctaaatccacaaaaatcttgaagtgtgaagcctatgccatgctgaaaattctgactttgttaaactgaaccccccccaatatcttgtgactgacttcccttacaaaatccaaagatctctgccacagtgtcctttgccgtctcagaaggtggaggagccagcacgtgtgcccgctcgcctgccccaccgcgccatgaagctgcaagcggtgatggagaccctccagcggcagcagcgggcacgtttgcagcaggagctggaagccaggcaacttcagcaggactcatctgagggccgcacaccaccttcagcaggataccctggtaatggaagtgatgaagcagagccagaggccttaaaaatccaacgggcacaggcagcagctctggctgccatgagggctgctgctgctggactcagccaacagcctagtccagctgcttctgaggaggaagatggggaaagcatggcatctgacgaggaggatgaaaaagaaagggatggggaaagtgaacggtaccaggacatggcatcagaggaggaggatctgaagggcaaatgggatgaggatgattttgaggatgaaggagaagatgaatatgaggacatggaggaaggaattggagtgaatgaggctggcagggtgggcaaggggtcaacactgccccccaagcactctagtcaacaggcatttccatcccagcgttcacaaggagcagagcgcgcaggtcttcctctatcaggacaccctcaactgcaagatcatggagactggacatatgaagagcagttcaagcagctctatgaactggatggtgaccccaaaagaaaagaatttctggatgatctgttcagctttatgcagaaaagaggaacccctgtgaatcggatcccaattatggccaagcaggtcctcgatctgtacatgttgtatgttctggtgacagaaaagggaggcttggtggaagttattaacaaaaagctgtggagagaaatcactaaaggcttgaacctaccaacgtcaatcaccagtgcagcctttactctgcgcactcagtatatgaagtacttgtatccctatgaatgtgagaagagaggccttagtaatcccaatgaactacaggcagccattgatagtaacaggagggaagggcgaagacaaagctttggtggcaccctcttcacatattccccaagtggtgccccaagcatgctttcatcccctaaattacaggtgtctggtttgtcgctagggggtgctgcattaaatgggagcactctgtcatccatgcagaaaatcaaaaaagaggaggattccccaatctctttggcaatgccaccacggattccagtcaccttggctggacattctatggtagcagcacaagttgctgctcaggcagctgctctggagcaacttagagaaaagcttgagtctggggagcccccagaaaagaaaatggcattgggctcagaagagcagcagagaattatacagcgaaccatccagcacaatctcctggcaatgactgcacagcttcccatgaacattcgcatcaacagccaagctgaaggacgacaggattctgcagtgaacctcacaaccaacggaactaacagtattagcatgtctgtggagctaaatggtattgtgtacacaggtgtgctctttgctcagcctcctacctcagcatctgggactagcaaggggagctccaaccggactggcagcattggaggaggcagcagcaactcgcaagctgctcccccatcaaccccctcggcacccaactctaataacccctctccctgacattgagccgccaaatcttcacacagctgacgccaaaaattttggaattgttccttgtttcacactcaggtttattactccgcgcaggagggagctcacggaacgcagtgctgggggtttttaagcagggggcaaggttgagccagcgcaaaatcagtcagaaatctcttccctaagtgaaaaaaacacaaatacctcatttcttgcactgcaatcaaaatatattttgtattacctccaaaaccacactgcctacccttttatcccaagctgcgctccggaatccacccacattcaattatcttttctttacccttttaacttttaatatctaaataggaaaaacaaggctggtatggatttttgatgtaaatgccttttattctgaaaatcaaagaaaaactttaaaaaaaaaaaaaaaaaaa

SEQ ID NO: 260 - DNA, 4522 bp, Xenopus laevis
agagcatccaggggaagaagctaaatgaattaactcagcgaccggccatcacatctgcaagcagcatccggcccagaggagcaacctgtttctgattatatattgccctaaaaattttggagactgtcgctaccggacttggtaaccatgacaacccacgtgacgctggaggatgcgttatcgaacgtggacctcctggaggagctgccgctccccgaccagcagccgtgtatagagcctcctccatcctccatcatgtaccaggccaactttgataccaattttgaggaccggaatgcgtttgtaactggaatagccagatatatcgaacaagccacggtacattctagcatgaacgagatgctggaggagggacaggagtatgctgttatgttatatacatggagaagctgttccagagctattccacaggtgaaatgtaacgagcagccgaaccgcgtggaaatatatgagaaaacggtggaggttttggaacctgaagtgacaaaactgatgaagttcatgtatttccagcgcaaggccattgaacgcttctgcaacgaggtgaagcgtttgtgtcacacagagcgcaggaaggattttgtgtcggaggcgtatctgctgaccctggggaagtttattaacatgtttgcggtgctggatgagctgaagaacatgaaatgcagtgtgaagaatgaccactcggcttataagagggctgcccaatttctgagaaaaatggccgatccccagtcgatccaggagtcacagaatctttcaatgttcttggccaatcacaatcggatcacacagtgcttgcaccagcaactggaggttatccctgggtacgaggagctcctggctgatatagtgaatatctgtgttgattactatgaaaacaagatgtacctgactccaagtgaaaaacacatgctactaaaggtgatgggatttggcctgtacctgatggacgggaatgtcagcaatatttacaaactggatgccaagaagagaattaacctcagcaaaattgacaaattctttaagcagctgcaggtggtgcccctgtttggtgacatgcagatagagctggccagatacattgagaccagtgctcactatgaggagaacaaatcaaagtggacttgcactcagagcagcatcagtccccagtataacatatgtgagcagatggtgcaaatccgagatgaccacatccgtttcatctctgaactggcacgctacagcaacagtgaggtggttactggatctgggttggacagccaaaaatcagatgaagagtatcgagagctctttgatttggcccttagaggccttcagttgctgtcaaaatggagtgctcatgttatggaagtgtactcctggaagctggttcaccccacggacaagttctgtaataaggattgccctggcacggcagaggagtatgagcgagccacgaggtacaattataccagtgaggaaaaatttgcctttgtggaggtcattgccatggtgaaaggtctgcaggttctgatgggccgaatggagagcgtgttcaaccaagccatacgcaacactatatatgccgccttgcaggactttgcccaaagcagcttgcgggaaccgcttaggcaggcagtgcgcaagaagaagaacgttctgatcagtgtcctgcaggcaatacgaaagactgtatgcgactgggaggcaggccgcgagcctccaaatgacccttgtttgcgtggagaaaaggacccaaaagggggttttgatatcaacgtcccacggagagctgttggtccctccagtacccagttatacatggtgcgcacaatgctcgagtctctgattgctgataagagtggctctaagaagaccctacggagcagtctcgatggacccatagttcaggcgattgaggaattccataagcagtctttcttcttcactcacctcctcaacttcagtgaggccctgcagcagtgctgtgacctctcccagctctggttccgagagttctttctggaattgacaatggggcgccgtatccagtttcccattgagatgtcaatgccttggatcctgactgaccacatccttgagaccaaggagccttccatgatggagtatgtgttgtatcccctggacctctacaatgacagcgcctactatgctttgaccaaatttaagaaacagtttttgtacgatgagattgaggcagaggtgaatttgtgttttgaccagttcgtttacaaactctctgatcagatctttgcttattacaaagccatgtctggcagcgtcttgctggataaaagattccgtgccgagtgcaagaattacggggtgattattccgtacccaccctccaatcgatatgaaactctgctcaagcagcgacatgtgcagctattgggcagatccattgatctaaataggctcatcactcagcggatctcagctgccatgtacaagtctctagatcaagcgatcagtcgatttgaaagtgaggatctgacctctatcgtggaactagagtggctgcttgacatcaatcgcttaacccaccggcttctctccaagcacctgaccttggatagttttgacgccatgttccgagaagccaatcacaatgtgtcggctccttatgggaggaacaccctgcatgtcttctgggaactcaatttcgacttccttcccaactactgttataatggctcaaccaatcggtttgtacgtaccgccatcccattcacacaggagccacagagagataaacctgcaaatgtgcagccatattacctatatgggtccaagcctctgaacattgcctacagccacatatatagttcatatcgaaactttgtggggcccccgcattttaagaccatctgccgcctgctggggtatcagggtattgcagtcgtgatggaggagctgctgaaaattgtgaaaagcctgcttcagggaactgtactgcagtatgtaaagacacttattgaggtgatgccgaaaatctgccggctgccaaggcatgaatatggctctcccgggatccttgagttctttcaccaccagctgaaggacattatagagtatgcagagctaaagacagatgtgttccagagtctacgagaggtgggaaatgccatactcttctgtctgctcatagaacaggcattgtctcaagaggaggtgtgtgaccttctccatgcagccccattccagaatattttaccacgtgtctatatcaaagagggggagcgcctggaggtgaggatgaaacggctggaagctaaatatgctcctcttcatcttgtcccattgattgagaggctcgggacacctcagcaaatcgccattgcacgagaaggagatcttctgaccaaggaacgcctgtgctgtggcctctctatgtttgaagtcatcctgacgagaattcgcagttacctgcaggaccccatctggcgcggacccccacctaccaacggggtgatgcacgtggacgagtgtgtcgagcttcaccgcctgtggagcgctatgcagtttgtctactgtatccctgtagggacaaatgagttcacagcagagcagtgttttggagatggattaaactgggctggttgtgccattatcgttctcctcgggcagcagcgcaggttcgacctgtttgatttctgttatcacttgttaaaggtgcagcggcaggacgggaaggatgaaatcataaagaacgtgcctctaaagaaaatggctgaccgaatccgcaagtaccagatcctgaacaacgagatctttgccgtgctgaacaaatacatgaaatcagtggagagcgacagttccacagtggagcacgtccgttgtttccagcctcccatccaccagtccctggctaccacctgctgagcgagagggtgggaccccctgacgtgcaccagatctgcttgcggcacttcttgtgatgctgtggtgtatgtctgtcccgttgccactacatgtgctgcagtagcctctggataatatgtcgttatgtggccgcaatactacgtgcttcagcctggtgttgcacacggagatctaatggatcaaataccatcatggcccaaaatgcgaatgctcctccattgtcgccagctgcttgttggactgtgaagatttagattttatgcttcagcctgagctctgttacatttccatgaatatattttgtttttctttcttgtcagcaacgtacgaatctccgaacgccctgttttaccttcctatttattgtgaaaaccttgtgctagtgtgacttgcagagtattcccgctgtccatatccatcactgtggaaggactcggagatcccatcctggcccagaactccagataaacggaaacctgcacagaattattagaatcatgttcctgttccgggggaaccattctatgatgtttgtacctctgtgagattgccatgtacacatgacacttgttaaagaatatgtttttatccagaaaaaaaaaaaaaaaaaaaa

SEQ ID NO: 261 - DNA, 2938 bp, Xenopus laevis
gcagaaacagcacagtcaagcaagtttctgtccaagcagccttgttgtgatacagtatcaaaatgatatgacggcagttcctttgttatctgactacagatgagctttgtatatcttgatacagactccaagtgacaccaacactgagaataatgccatccttgcctaatgagtccgatcaccaagcaacatgcagcctttccatgcactccgatttgccttatcagccttctagttctattaaaaggaaagccagaaaaaagaagaaaaatggagcaattactgctaacgtcgtgggcaccaagtatgaaattgttcgtttagtgattgaagaaatgatgtttactaaggctcgggacgacgacgagacagcaaaccttatctggagtgattgtgctgttcaacatgagaaaattgcagagctcaggaattatcaacgaataaatcattttccagggatgggagaaatctgcagaaaggattgtcttgcaagaaatatgaccaaaatgatcaagtgtcaacctcatgaatataactttattcctcgaacctggatttttcctgctgaatacacccagttccaaacatatattaaagaactaaagaagaaaaggagacagaaaactttcataatcaagcctgctaatggagcaatgggacatggaatatcactaaccagaaacggagaaaaacttcaagctcaggatcacttaattgtacaggaatatcttgagaaaccctttcttcttgaaagttacaagtttgatctacggatttacattcttgttacctcctgcgaccctctaagaatatttttatataatgatggacttgttaggatgggcacagagaagtatcattctccctctgaatcaaatctgagccagttgtacatgcatctgacaaactattctgttaacaagcataatgaaaactttgaacgcgatgaaacggagaatcgaggcagcaagcgctccatcaaatggcttacagaattcctacgagccaacgattatgacatcagcaaattttggagtgatatttctgacctggttgtaaagacgctgatagttgcagagcctcatgttcttcatgcgtatcgcatgtgtcggcctgggcagcaccctaccagtgagagtatctgctttgaagtcttaggatttgacatcattttggacagaaaactaaagccatggcttcttgagatcaatcgtgctccaagctttggaacagaccagaaaattgaccacgatgttaaaaagggcgttttgctaaatgctttaaagcttctcaacatcagagcaagtgataaaaagaaaaatttggccaaacagaaagctgaagcccagaagagactttatggtcagggctccatgaagaggctgtcaccagcatcttctgattgggagaaacaacgccatacactggagagaaggaaagaagagcttaaagaaaggctttcacaagtacgaaaacagatctctagggaagagtatgaaaaccgacacttggggaattacaggcgcatttacccacctgaggataagctgttattagaaaaatatgaaggtctgctagccactgccttccagacattccttgctggcagagctgcctccctccagcgagagatgaataatcctttgaaaagaatgaaggaagaagatattttagatctgctggagcagtgtgagttagatgatgagaaactgtcaggaaaacctacacggccaaaggagccaaggacactttcatccatgccagaaagtacacataccttgaagaaactaaagaattacagcagccacagcagcagtaacagtactggcagcagctctgacacagaggaggaagatgaaaaagagaggaaagagaaaaaagtttcatatgatcttgaagaacataagtacaaatcactggaaaggtctagtagaatatactggaaacctcctcttaaagcagctagaccattttccaacttatcttctccctcatctgctgctcctatgagacgctctgtaagctgcccacgttccataaccgcattaaatacacagacgccaactactgaccagcgaccattttcctcgagaatatcatcaactatctcaagacctttatcaggcaacagaacaaattctttaaatcgcagctcttcatcaaaccgagtgcctcagtccagtacttctggcagtgcctatccgtccataagtgagtctaggttagatcatttaacaaaggagcaggaagaggagctcacaaagcagaccttatatgctctccgagacatgagaatcaggattccaggaaaaggagtggaagaaataacacattctcatctagatgaaataatggataactggacatgccacaaatcaaaggttgcttcctattggttaataaaactggattctgtaaagcaacggaaggttttggatattgtcagaacaaacattcgatcggttctccagcgcatctggaaagtatctgacgtggaatgcttgcacatatatcgcagtttcaatcgtgtctttaaccgtctgctatggaatcacggccaaggcctgtggagctgtttctctaattcaggtacctcctgggagaccatattctgcaaaagcacagaggttgtgactccccagcagttccagtgctgccaacgactagttcagctttgcaaagactgcttgctagttgtttacaagtatgcaacagattcaagagcatcagtgacgggcattagtccagactgggatgactcaaggtatttatttcctgtagtgccacaattcaccatgaaatcttcctcttccggtgtgagctgcagcgcgtccagattgcctcgctccagcattttgtttaaccctcgacacaaccactactgaatgaaaaacatcaaagtgaagggcattttgtattaagtaaaaaaaaaaaaaaa

SEQ ID NO: 262 - DNA, 1549 bp, Xenopus laevis
ggcggaagtcagcgtgtcagctgtctgggtagctaaagatggcgactgaggcggagtacgagtcagtgctgtgtataaagcctgaaatcaacgtgtaccggatcccaccgcgggcatcgaaccgaggatacagagcctctgactggaaactcgaccaacccgattggacagggagaatgagactcacctccaaagggaaagttgctctcatcaagttggaggacaaagtgtcaggagaactttttgctcaagcgcccgttgatcagtttcctggaattgcagtggaaacagtgacagattccagccgctactttgttctcaggattcaagatggaaatgaaaaaggaagaagcgccttcattggcattggcttctctgatcggggagatgcctttgacttcaatgtagctttgcaagatcactttaagtgggtcaagcaggaatctgacttatcaaaagaacctgtgggacaggacaatcaacccaaactcgatttaggattcaaagaaggtcagacgatcaagcttaatattgggcacatgaaaaagaaggatggctctagtaagccgagagcaggcactggaaccggcaatattactctgctgcctccacctcctgggggtaaaatttctgcaccaccagtatctgtgttcagttcagccccagtcgctaatcatgtgactcccccaccactgcagccccccaatgcttcaagtccagacatcctactagacttggacaccccagtagcagcacctaaagcagccagtagctcatcagacctttggggggatttcagtactgcaggcagcattgtgtcctctgaggatccgcagcccactagttgggttcagttctaacagccgacgagagactcttcccttgtctcccctggagaagagaagggcccctccgcactcacagggggcccggcactagaacacatatcattgtgatgctttcattaccaggccgggtgggattcagagctggtaatgtgcagattggcatcaggtcacaactgcagttttatcccccatttatgtgtctctttccctttacgacaacgctgttatgaagtagttttgttgctgcatctgtcactttgcctctcattgatataagcagagaaagggctgtgtgtccattctgtctgtcattcctccttgctggatagagccaccaatcagcatcattcctgtggcattacattccgctaaacttcgccccctgcccttcccccgcgcatgccgcctcgcttctgatggacggattgtgtttgtcatacgtgtggcagttgctccgcacaataaggggaggggtttgtcactaacgggagagggtgctgctcgtggcacctgatttaatgtgcaattgattcagttatttgagtagccatatttatcactcgtcctcttgtgggagaaagggagaagccccatatttcatgaacttagatttgtgtatttttgttgtttaaccatgaaaatgtatttattatgttgtgaaggaacaataaactaactgtaccatgaaaaaaaaaaaaaaa

SEQ ID NO: 263 - DNA, 3561 bp, Xenopus laevis
accgcatctgtgtttccctcccaccctgctgccttcgcttctttctgtcacaggctgtgagtgtgtctgtgcggctgctgctgtctgctctcgggctgcggtggcggaaggaaggaagagagagaagaaagggaagaaatgaaatctagctccggtgcgtccgactccaggcagtcccccggcggctgagccgtgtgaaacagacagggcggataaagtccctatttcattcttttttccccctccactttgctgcacacttgcgcctgtgtgactccgcggccgtgcgaggatgagcggggagggataccagtaccgggccctgtacccgtacaagaaggagcgggaggaggacatcgacctgcgcgtgggagacattctcacagtgagccgtgccacgctgctgcctctgggctgctatgcggagggaatggaggcccggcccgagcagatcggttggctcaatggatgcaacgagaacaccgggcagcgaggggacttcccaggcacctacgtggagtatcttggtaggaagaggatcagccctccgacccccaaaccgaggccccctcgtccgctgcctgtggctcccggggcggcgcgtggggaatcagagacacaggcttttacacttcccgacctgaccgaacagttctcaccacctgatacagcccctccgctccttatcaagctcatagaagccattgaaaagaaaggtctcgagtctgcaacattatacagatcccaaagttccagcagcttgactgaactgagacagattctagagtatgatgctgcttcagtggatttcgagcagtttgacatagcaattctatcagatgctttaaagcgctaccttttggatctgccaaatcctgtcattccagctttaatgtacagtgaaatgctctctgctgccagagagtccataagctccgaggaatatgtgcagctattgaggaagatcatccgatgtgccaacgttccacagcactactggctcacccttcagtatctgctcaaacatttctttcaactctgtcaaagcgccagcaagaacttactgagtgccaagtcgctggcagaaatcttcagccccctgcttttcaggatccaggtatccagttccgacggctcggaattcagcactcagatactggaagttctgatcacaagcgagtggaatgagaagcaagctgctccagcactgccaccaaagcctcccaaatctactgctgtaacaaacaacggtacaaatcacattatgtctctgcaagatgctgaatggtactggggagatatttcaagggaagaggtgaatgaaaagctgcgtgataccactgatggaacctttctggtacgagacgcctcaacaataatgcatggcgactacaccctaactctaaggaaaggtggaaataacaaacttatcaaaatcttccaccgggatggaaaatacggtttttctgatcccctgactttcaactctgtggtcgaactgattacccactaccgaaatgagtcgcttgcccagtataaccctaaactggacgtcaaactcctgtatcccgtgtcaaagttgcaacaggatcaggtagtcaaggaagacagcatcgaagcagtggggaagaagctacgagagtacaatgttcagttccaagagaagaatcaagaatatgatcgactatatgaagactacactaggacgtctcaggaaattcaaatgaaaagaactgcaattgaagcattcaatgagaccataaagatattcgaagaacagtgccaaacacaggaaaaatacagcaaggagtacattgaaaaattcagacgtgaaggcaatgagaaagagatacaaaggatcttgcataatcatgaaaagctgaagtcccgcatcagtgaaatcgtcgacagcaagagaaggctagaagaagatttgaagaaacaaacggctgaaaatcgggagattgataagcgaatgaacagcatcaaaccagatttgattcagctgaggaagacaagagaccagtacttaatgtggttgacacaaaaaggcgtgagacagaagaaattgaacgagtggctgggcagcgataacactgaagatcaatattcagtggtagaggacgaggacttgccacatcaagacgagaggacgtggaatgttggcaacatcaacagaaaccaagcagaaaaccttttacgtgggaaacgggacggaacattccttgtgcgagagagcagcaaagcggggtgctacgcatgctctgtaatggcagacggagaggtaaagcactgcgttataaacaaaactcatacgggttttgggtttgcagaaccatacaacttgtacagctctctgaaggaactggtgctacattaccaacaaacgtcgctcgtacagcacaatgactctctgaatgtgacactagcacaccctgtatatgcacagcaaaggcgatgaagtcccgacaaactgtggagtttactcctacactgacaacattgaagcctgcctgggctaaggaatataaataaagctccttcatcgacctaattcacagattgagcggcggtatcaaagtgatggaataagagctttcttttgccatggaagcaggagacgagtgttaagctgtgaatgtatgtctctaagctattgtgcttgctttctaagaaccaaaagcacagcaacgtaaagatatgctattaaagaataataaaagccaatctcccaggcctgcaggtacctagaggccttcaccatggtgcttgtttacgttctattaaagctttaccagctcgaatgttggtctgcggagatctaagaagccaaggtgtctttgtcagtactgattgggggaaccgttccatcgtaaaacctacttataaacgactcgtggcattgtatacggcggatctagagcctttgcggattgtatcatttccccaccccccaaaaatttctatatatgtagcggaatggcacttttcatcattttcttattaaatggaactgcaaggaaatgacaaaagcaacgaattgccgggaagtgtttttaattaagactatgaaaattctctcgtagagtctatttaatgaggaagatggcaggatggataaatggcaaacagtatatataaatatatatatgtacatagcattgggtgactagctgtcaaaatggaactcataccaaactgtcgacttctcgtttattttgccgattgctgaatccttaatgctatgcaacatcagttttcctttgagctgttttttttttttatatatatatatgtgtaccaataagaaaacattctgttcattgtgaaataatgttactttttttgttatcaacgttttgtttttttgtccgtataaaacgtgcagtacgtctcgagagaggtgcaaagctattttaccataaaccttgtatagaaaaacttcagctctgagccgaagatttaaagaaaaaaaaaatccacgacagatattggatttcattgttttgttgggcagtgcctaataagcttcaaagctgctttattaaaaaaaaaaaaaaa

SEQ ID NO: 264 - DNA, 797 bp, Xenopus laevis
taacgtcgcgaggccgtaattagagaccgataaccgggaggaaagaacagccgcagttatggagtatttgatcggtattcagggcaatgatttcgtactagtggctgcggacacagtttgcgccaacagcatcattcggatgaagcaggatgtggacaaaatgtttaagatgagcgagaagatcctgctgttgtgtgtaggagaagcaggtgacactgttcagtttgcagagtatattcagaagaacgtgcagttgtacaaaatgaggaatggatatgaattgtctcctactgcagctgcaaacttcacacgtagaaatctggctgactaccttcgcagcaggactccttaccatgtcaatcttctacttgctggctatgatgaacatgaaggaccctctttgtattacatggattacctagcggctctagctaaaacacgttttgctgcacatggttacggagcttacctaaccctcagcattctggatcgctactacaaaccagacctgacaagagaggaagcagtagaacttctaaagaaatgtatagcagagctccagaagcgcttcatcctgagcctgccttcattcacagtgcgggtcatcgacaaggatggcatccatgacttggaaagcattcctgcttcaagcctttaacctctccctgactggcctccatctttctttttttatatattaaggttgatgtgtaccactgtatgaaacttgcacaaataaattaccctgtgcattagcatggaaaaaaaaaaaaaaaaaaaaaaaaaaaaaaaaaaaa

SEQ ID NO: 265 - DNA, 1496 bp, Xenopus laevis
gggactgaagagacacaggcaaggcaattaatgctgcagggattatttgtattgctgagaacggagttgttacaggtgacaaaccttttcaaatggagcagcctgcaggtcttactctaggagaaagcatgtctcttaccctatagaacaggactgttatggacagctactaatctactgattcctgccaatatctgataaggagaacaatgagaatcgtttagaactggacagaggtgtctatgaagagaggcaaaaatggagcaggattactctgaattatctaataccacagaactctggttctcttccttatcacaactggatatttttggaagggtaacaccaaccaatgcatcaatcagtaacagtacaacatactatgacatgacaagcaatgccatcctcacttttatttactttgttgtttgcattataggactctgtggaaatactctggtcatctatgtcattctacgttatgccaaaatgaagactattaccaatatctacatactcaatttggccattgccgatgagctgttcatgctcggtttgccctttttggccatgcaagtggcattggttcactggccttttggcaaagtcatttgtcgtattgtgatgacagttgatggaataaaccaatttaccagtatattctgtctaacagtcatgagcatagacagatatcttgctgtggttcacccaattaagtctgccaaatggagaagacccaggacagcgaaaatggtaaatgttgcagtatggacaatctcccttttggttatcatgccgattatgacttatgctggcgttcaaagttatcatggcagaggaagctgtacaataatatggcctggaaattctagtgcctggtatactgggtttataatatatgcctttatactaggttttctagtaccacttagcatcatctgcctatgctatctcttcatcataatcaaagttaaatcatcaggcatacgggttggctcttctaagaggaaaagatcagaaaaaaaggttactagaatggtgtctatagttgttgcagtgtttatcttttgctggcttcccttctacatatttaatgtatcttcagtatcccttttgattgtgccaaccccagggttaaaagctatgtgggactttgttgtggttctgagttatgccaacagttgtgccaatccaattctttatgctttcctttctgacaactttaagaagagctttcagaatgtgttgtgcttatcaaaagtcagtggcatggatgaagcggacaggagtgacagcaaacaagacaaagccaggttaaatgagaccacagaaactcaacgcactctgctcaatggagacctccaaactagtatatgaataccaacatgtggagatataaacaaaacctgacatcaagacaagcatcaggggtgttttacaaaacagttgtatctgattttggctgattaaaagctttcatcaaaaaaaaaaaaaaa

SEQ ID NO: 266 - DNA, 1766 bp, Xenopus laevis
ctagttagctggaggagttctagcgcccttgcacttggggggcagcggttgggaattgagggagttctctgacctgggagccgtaattcatctttaagactcggttagacacagcgggaatctgcccgaagctcttccagcagcaggtgaccgagtcgctttggttgtatgtgctcagctctcggatatagtggggtgcgcacccacacaagacatccctgttgtacttcggcttcgtgtccctgacctgatcacccccaggagattgtagccgctggaatactgtccgccatcaattgccgggggagcgagtttccctgcctgcccgcacctcttttgtgtgttgcccatctcccgaccccagcactcgcgctgcttgtcactaatggataccgcttccacttctacgtttgattccgaggatggcactccaaattacaggaggaggcgcactgtggaggatttcaacaagttctgtacatttgttttggcgtatgctggttacatcccatacccggaagaggagacccctctgagagcaagttccagccctccaaatagcacaggcagtactgttgacagtgatagctgcgactcgagataccaggaccttccatcaagcgatgctttgccactcaaaaagaggaaaagctttagtgacctaaagcatgagaggagctatccccctgtgctcaaacgatccaaactgagctcctttctgctggacaggaagaaattagacaaaatcaagaagaagaaaaagctaaagaaaaaggaactggaggggctcaagcaagaagagcctgtaaaacctataataaaacaagagccagtagagactcccatagaagagagtactcccatcgatcccattgctcctatcccggatgagcatttggagcttaaaaagtcaccagcacacgagatacaggaacctctgctagacaattgccccaccagcatggacagtccctctgtatcaatgccctatgaggatgcagaggaaataaagaatgagtattctgaggtaaacctggggaagagaacagttattcgacaggggaagcaagtagtctttcgggacgaagacggcacaggaaatgacgaagatattatggttgattcagatgatgattcgtggcaccttgtaacctgcttctgcatgaagccttttgctgggcgaccaatgattgagtgcaacgaatgcaacacttggattcatctctcctgtgccaaaatccgcaagtccaacgttccagagatctatgtttgccaaaagtgccgcgacaccaaattcgacatccgacgatcaaaccgctcgcgtatgggctgcaggaaattatttctggactagcgttgttccaaacagaagcgtgtgcccacggacacaaagtagcactataagcacacgggtcaactccactgggcgacagacatttctctcggatactctcttcaaattcaacaataacacacagtttggtttaatctgggcaccaacatgcaggtgaagataatcgtgcatttctttcatggcccaagtacttagccgggatttacctcgatccaaagtttccttgtactgtgtcttgtgttataccttatctgttcacaggtgatagtggtggggggggtggtttgagcaattttctccggttactgtgatggtacgctccgcgtgtttgcaccaggggttactcgccaaggtttaggattaaacaatacttggtctctcctctgataaaagttataaaaaaaaaaaaaaa

SEQ ID NO: 267 - DNA, 3689 bp, Xenopus laevis
ggaagagacgggctcccagcagcaacaggagtaggacctgccactctctcggccgggccatgggggatgtcatatccagtcacctggacgagagccggcgcaactacatcacagagtgtacgggaaaacttctcacagagtttgggaagctgtatgaagagcagtatggggtcgcactctttaatagtatccgctatgaaatcgaaggcaacggtggacctcagacacagctactacatcggaaagctcctcttaaagaccgggtgatattttcaggaaacatttaccagtatttggaagacaccaagaaatggaggaatcgatactgtctggttcctcaccattacggaccagtcctctatgagaacaagacaacatttgagcgtggccttcagcccagggctggaatcaactgtgcaggcattaaagttctcacctctttggaacaatatggagatttgatgaatgccagtgtgccaggtggaaaggtgaaggcaggaggcgcacagatcaaatgtgcaacaccgttcccagtcatcttgtggcacccatatagccgacaccatttcttctgtgtaacaaatgagaaggagcaggagaggtggagtgctgttttccaggactgtgtgcgccactccaatgatggtattcccgaagaaccgcgtttggaatcggctgccttcactgactcggtgcggctctatagacaagctcgggaccaatatgggacttgggatatgatgtgtgggaatcaggtgcaggtgctgagcaacttggtgatggaggatctgacccctgacttaaaaaacatcatctgtcccaaactgaaggggaaaccccaggagaggcagagaatgtggatgctgatttcagacacagtttaccgcatggtgtatgagcagactcgacacttctatgaagggttggagaaaaggtgctcggagaaaagagccgcaatggagagccagatccgaaccaacatggaccagatcatctcttgcaaggaacatgtgtccaacaagattcgagcgatggtgctgcccaaggctgagctgtgtgtgaggaatcacgttcagtctcacatctcatccattttggatgccttgatggttccaacaagtcagggctttgccgaggtgcgcgatctaatcttcagagagacaacggagatgaacatgaatctagtgaatgagggagggcgagaaaaactgggagagcaaatggagaagctgtcacaactggcctaccatccagtgaaaatgcagcagtgctacgagaaaatggatcagctgaatctagaaggcctgcagcagaggtttgatgtgggaagcccagccgtgttcaagcagagagcacagatactcatgagggagcaaatggataatgctgtctacacatctgagcagctggtacaccaagagctgagcaagtcagaaagtggatcaaacctgtgcagagacattcagcgtatactggagcgtgttctcaagaaatatgactatgatagtagcagcgtgaggaaaacgttcttccaagaggctctgctacagattatcatccccttccttctgaagaagttggcacccacctgcaaggcggagttcccacgtttccaagagcttatatttgaagacctttcacgctacgtgctggtggagaacacttacgaagaggttgtgctacagagcgtgatgagagacattgtgcaagctgttaaagatgctgccactcagcgcaaacacaatttgtacagggacagcatagtaatgcacaacagtgaccccaacctacatctgctgggggaaggaccaccgattgattggagtcaagattatgctgaccacagtgaaccctcttatgcgaatcgacaaggtagactgcgccaggtggtgtctatgctccatgaagatgaaggacctgacataccaggttcctgccaggaagtgccagcacaagaacgtattgcagaagttacagaggacagtgacgttgcaggttcttgccaggaagtgccagcagacagtgatgtagcacagattaggggcatgctgattaaagagtttgatatggagattccagttacaactgtatctacagtaccaacatcagaggttgccagaagtgctgccacagaggaagaagagacaaccagtgacaaagcccaatcaggcccaccaagtgcaagtgagaggagtaactcagaggacgaggaggtggaaaaggcaaggttattacttgcttctgagcttgccagacagttggctgaagaagaggaacagtatcacgctgatgtacatataactcaagatgatgtgactcatagcgaaaagtatgtgcttcatagttctgaccaaactgatgcaccccaaccagtaacgttgaaaaatggggaaattgcacatagtgacaatgagatggacccagaaagcgatcaaggaggagcactgagatatttaacacatagagtggacacccacgcttccctggaaatacccagggtaacagaaatcttgccctgtcatccaccaagggaagtaagtgctgccctagaagaggagagccagccgaaagcaggacagcactcccctacccacgtgatacattccactcccgatgatagtggctttcagtctccaataagtgagggagaggaggagggtgaaggctacactgaaatgccagttcctgctccacgaaagagggatgaaatcaacacccagttctaagcaaccacatgctggactggagcacaggtgttaaaatgaactcctatggagggcaaagccaggctctcgccttcttctcatagagaaacaaaactgcttatttaaatgctttgtggctctgttacatgctgcccgttggtataaagtctccattcattgccacactcatgtgctgcttttctacataatcctgtccagtggggtgccatgcagttgcacaatcccaggtatgctgtctctgcaaagctacccttttttcccctaatttctttggcttttgccattttatttcctattccattcagaagctgcattaacgctatctctgtatatatacaccctatgctttagcttaacactttgccacccacactgcaatgccattacagccaaccagcacccccacatggcactaccacattctacacttcactgaagaatatgaacactaatccagaggtgcactagaacatttcttctttgcatgtcacaaagtggtcttaaatcttgtgagtggtggtgcaggtgttgtttgtgtggcacagacttgtcctatcctcctgtgccatccatgcggattaaatgaggctttttgagtgtgtaacaaaacaccagggctgtgtgtatgtatgtgtttgaggactgacacagcaaaaacaatcttattaaaactcattagtggggggggggggtaacctgctccagcgttcccttgaccaaatagtgcagtgcaaatggaggccctcctgatgttttttaaataaaacttccagcgccctttagcagtcagtggggttcaacatcgcctagttggcctccatttgtctctgcatgaaagagtgccttttgatatcccattcctgcttccccctttcaaaatatattttattaaaacaaatgtttaaaataaaaatgcttctgatgataaataaaagaaacctttattataaaaaaaaaaaaaaa

SEQ ID NO: 268 - DNA, 844 bp, Xenopus laevis
ctagctggaactcgtattcgtgtgcaggacagactgaaggcaggatggtggccgagggagaccctgggaacctggtgaaaatttttcaccttcttgtgctctctgcatcctggggaatgcagtgctggatgacgtttgttgcagggttcgtgctgatcaagggcgtgcctcggcatacttttggcctggttcagagtaagctgttcccgtattacaaccatattgtcctgtgctgctcctttatcagcctggctatatatgcagcttatcacccccgggagttgctgtcacccagcgagagtgttcagatctctctgttcttcacatccctccttgttgcggcactgcaagctcgctggttttccccagtgaccaccaagaccatgtttaagatgcacgtcattgagagggaacacagcctggggcagggagtgggcttgtctgccaacaaggaaggatatcagctcttgcaggagaaggatcccaagtacaaagccttacgcaagcgtttcatgcgataccatggcatctcctccctctgcaacctcctgtgcctcctctgcaatggggccaacctggtgtatatagctctgctcatgcccacactgtagccaagcttctactcacccagggaccaataccataataagcacacgcatatatgtttatattgccatgctgagccagaggaatcaaatgccagtgattttacactaataataattgacaataagacaatgccctaatagaagtggcatatacagcgggtgtctaatcctgcagatcttttttttttttttatataattaaataaacatttctgaaaatcaaaaaaaaaaaaaaa

SEQ ID NO: 269 - DNA, 3412 bp, Xenopus laevis
ggcaaaaaaagcggctatacagcaccttacaaatcaaaactgggataataagaaaaaaagcaatgcaacatacagaaacaagtcgaaacaaacgtccagagggctctgctcgtgagcgaagttcaagttcaatcaagaatcgccttgcgcgctgccagaatatttctgggctggggttgctggatagagaaactagcaagacactgggaatgctaagtgcactatcccgaacaatgaagcatgaagatgatgacgaggacgatgtggctgacatttcagaagagcaaaagccggctcagcagaaagatactggaaacagttttcttgatccaagccagaactcattggctactcaagcaagtaaaagccataagaaggcatttcttaccgatgagaatgcttcatattcattcaatatgcacagaagttatatctgtgagcactgttacggggcctttaggagtagctaccacctcaaaagacaccaatatattcatacaggtgagaggccatatgaatgtgacatgtgtgaaatgaagttcattcagaagtatcacctggacagacacaaacgagttcatagtggggaaaagccgtaccagtgtgagcgatgccagcaggccttctcacggactgacagacttctgagacacaaaaggatgtgccaagggtgccagtctaaaattggggagacagattttatgttgtagtctggtaatttgtatgcatcatcctgtagctttgagacccaacatttcttattccactcaggacagaattatgataagctctggtgtttttgtaacaccacaaaaatatattgaagaggagtgactcctttacagagtgtctctgtcctctttaacacatttgcttattcttattcaaaggcagaataagaattttaactgcttgttaccataaaaaaaagactgagtcttggacctttatgcacagttccaagagtaataaatgtggccctctagtggagcagatgtattattcctgggccttggtgaccgctgtctcttttatttttattgctgaaaccatgtccgttttctaagtatcatttttagaacatttttgactgaaaatccctaattacaatgtaaatctctttatatcatttgatttatatatatattataatgatctcatgattgttttaatgggaccaatagtttttattttttttattttaccatctggtaatttgattttctctatttagaataaggtccttcagttcccttcagattctatttcgtttgaagatggtttcttctcctttatttgttttgaaattgtgttaaatattagcagggcaggaaacgcgctgaatcctctgaaacaggctagtgacgttcattgagttgttgtccttatttatattgtgttatctcacggcacactgaaatatttccacatccagtagtaaccgtttttcattcaatgcttataatgaataaattagtatttttttttcaaaaaatttttagagcaggagacctgcagtccactaacatggcaatttcaccttgcaataaacttgttgtatggggtttagtatggcattgacagtggtatcaatttttttttttgtttgtttcttagggtttttagtcagggaggtgaaaaaaatgtgtgtttttaagcctctgattgtgagatgagatttttctaaaatattatttatctttttgtttagatgttcattcttcagtacgtcattcaaaccactacctggttgcaaggattctgggtctctagcaactagattaccgttgaactagtgagatgtaagagaaataactataatacatttaacatagacctaaaaaaaacagatcagttgccagttgtctacatgaccaatgtgtatacagaccaatgtgtataaactagcaatataaagtaagggctggattattacactaagatcgttagaccttggtgtataaatggaggacctgtgacctatatcatactaaagtcagctttaaggtaaccttcaacttttaaggccctctgattgactctacataccataacttgctaaatagaagcacccaccctaatctgcctgtgccttcactataaaggctgtatggtagctacactgcgagacacattagggatacttacatatgtacatttatacatacatgtgcgtgaaataaatttttcttgcacaaccaccaaatatacagcgagcaaagcaacaatgtggattcctctacgacaaatagttttagctttataaaagatgtgagaggtttttattgtttcatgtcacttgagagcatatttaccggatgttgatttaatgatcatattaaaatgttgccggtgggctaatcagtagtgagacactgccagccttcattgggatggactatagctttaaagaaactcttctttgcgtctgtcatttacgctgcaatgtgtcttggcaattttttttttttttttctcaaatacttttttttttttttaattggtcacaacgaatagactccacttttatgtcatgaataatatggtgctgtgcctggagtgagtgtcttccattacaaagtataccctctatctgctggctatagaagcaggggagatgcagcagtacagtacagggacatagggattgggcatcatgcgttggccatcttattacaagtagtgtgccactttttcagcatggagaatgttcatgggttatactaacatgatgctgtcatacaaaaagactatgtaatgtcccggaaaaaggctgggtggccatagaaatgctttggacagtgtttggctccgaaatctcccccagttgtccagtgcttgtataggtggtgcaacatttcatgaatctgtttattttcacagagccatttatttgtagggtagggtctcagtgggagattgtatgatgtgatacaaagactttattcatcgtgttaaaattatagggtatattggatattttgaacatgtccatcctgaagcttttaaactgtaataccttttcagctgtcagaaggatcctgggaattgcagcccaacagctggaaggccatatcttagatatcctaatatatgtatcccacccccttggaaattggggtttagccttttgcagggacccttttctacctggtacaaacgactgtataataactactgctattataaaggcaaagtcttttctctgtatgtttattttcacagtaacctttttaatgggtttgctttaacattagactagagggagagctttttaaattgtagattttttttttttttttgttaacactgtacagtctgttgtatccttttcccctcctactgcctgggtgtttagaatatttaaataaacgtgtttttaataaaaaaaaaaaaaaaaaaaaaaaaaaaa

SEQ ID NO: 270 - DNA, 2487 bp, Xenopus laevis
ctgagcatcacactgaaggctattttagttgtatgtcagaaaccaaaatggatgaaaacgaagattccagtatagctgcgaccatgggcttctctggatttggtaaaaaggcacgcacatttgacttggaagctatgtttgagcaaacacgcagaacggcagtcgagagaagtaaacaaacattggaagcaagagagaaagaagagcagctctccaataaaagtccagtcattaaaggcgcaccttccagttctgggcagaaaaaaaccaaggcttcaggttccagtagtggttctgaggacagctcagatgatgagttaattggtcctcctctacctcctaatgtcactggagatcatggggatgagctcattggccctccactcccccctgggtacaaggacagtgatgacgaggatgatgaagagcatgaagacgatgataatccagttaaggacatcccagactcccatgaaattactcttcagcatggcacaaagactgtttctgcattgggactggatccatctggtgcacgtctggtgactggtggatatgattatgacgttcgattttgggattttgcaggaatggatgcctccctacaggcatttagatccctacagccatgtgaatgtcatcagataaagtcccttcagtacagcaacacaggggatgttattcttgtggtggctggtaactcccaagctaaagtacttgacagagatggattcccagtcatggagtgtgttaaaggagaccagtacatagtggacatggcaaatactaagggccacacggccatgcttaatggaggatgttggcatcccaaaataaaggaagaatttatgacctgttcaaatgatgggactgtgcgtacttgggatgtctccaatgagaagaagcacaagggtatatttaaaccaagatctgtgcaagggaaacctgtgatcccaacgtgctgcacttacagcagagatggcaaattcattgcagcggggtgccaagatggatccatccagatctgggatcgtaatatgagtgtccacacaaaattccattgtagacaagcacatactcctggtactgatacatcctgtgtgactttttcgtatggtggcaatgtccttgctactcgaggaggagatgacaccttaaaaacttgggacatcagaaaatttaagaatcctcttaatgtggcctctgggttagaaaacttttttccaatgaccgattgctgcttcagcccagacgataaactcttgataaccgggacctccgtaaagagaggcatcggtgatggaaagttactgttctttgacgtagtgacatttcagaagatctatgaaatccaggtcacagaagcgagtgttgttcgatgcctttggcacccaaagctgaaccagatcatggtgggcactggcaatggattggctaaagtatattatgatcccaacagaagccagaggggagccaagttatgtgttgttaaaactcagcgaaaggaacggcaagcagaaactctgacccaggattatattattacacctcatgctcttccaatgttcagagagcctcgccagaggagtacgaggaagcagctggagaaggatcgattggaccctgtgaaatctcataaacccgagccaccagttgctgggccaggtcgtgggggccgagtgggtacccacggaggcaccctgtcttcatttattgtgaagaacattgcgctagataagaccgatgacagcaacgcacgagaagctatactccgacatgcaaaggacgcagaacaaaacccttattgggtcgctccagcatattccaagacgcagcccaacactgtctttgctgaagtggattcagatgaggaggaaccagacaatgaaccggagtggaagaagcgcaagatctgaacaataaaggagtttgctgtgttatatttaggggcatatttatcaaggatccaatttcgaatttgaaaaactttgaaattcgaaaagaccaaccgaaattaagttaaagtttttgttggttgaataggtccaatatcgatcgaataggtccgtattcggccgaatttgaatagtacaaatcgaagtaatagcgcattcgtttttcccaaaaaaaaaaaagtccaccaattgactccataggctaaaacatcaatttggtaggttgaaacagtacatgatatttcgatattcaaatttaaattttttttttttcaaatttggactattccctagtcgaagtacacaaaaaatagctagaaattcaatttttttgaatttgaaaattcacctggacctgttaaatctgccccttagtgtctctgctgaacacattcattctgttccttttaaatatgttgttttttcacacttttcttttttttagatatcagactgtatttgataaatcgaggacaaataaagtaaaaaaaaaaaaaaaaaaaaaaaaaaaaaaaaaaaaaaaaaaaaaaaa

SEQ ID NO: 271 - DNA, 1666 bp, Xenopus laevis
gccgtcaggaatccgtgtaggagctgatccaccactacagcaggttcctgtgcctccagctttacagaaagaagtgctggagggaggcgcagtgacaggggcacgacagggaagtgctgggttgctcaggatggagccgaatcagccattcctacagggcagcacagcagaaggcagactatgatctacagctgatgtccggccacttatccttgtccagatgctcagtgcctgctgatggtttgccgtggagccccttgcactaactgctcatcccctcccctcatccccaggaccctcctcactaatgactggctggattgttcttcccatcagcttgactgcgttttctatcccaggaatatggattgtttacgccatggctgtaatgaaccatcacgtgtgtcccgtggaaaactggacctacaatctaacgtgtaccgatgacaacaccaaagctgggaccccaaaatcttgctgcaccctagaggatgtcccacttattagtaagtgtggtacataccctcccgagagctgccttttcagtctgattggaaacgtgggagcattcatggtggtgatcatctgtctgctgagatacagtcaggtcatagagatcagtcagagatcctggttgaacactacggctttgatagccggctgcactaatgctgcaggactggtcatggtgggaaactttcaggtggattatgccaagtctctgcattatattggtgcaggagtggcgtttccagctggattgctctttgtgtgcctcagcagcattcttagctaccagttagcggccagcgcgcttgattattggctgggacatctacgtgtcagcctcaccattgtggccttaatatctctcgtcctaactggtgttttcttcatccaggaaagcttccttatgcagcacttggtggccatctgcgagtggatctttgtccttgacatcctggtcttctatggaacctttgcctacgaatttggctctgtctccacggatacaatgatggctgctctccagagctctgctgcccgcagctgcaagtctccaggaagctccagcacctccacccaactccattgtaacgccgagaggatcgctatgatatgaagggcggggcgtctcatcacccttcaacactcaggacatttatgaaactttttttaccaagtaaatgaaacaaagccaattttcagccaatgcacagccagacgggtttaagcaatgggccatgtggtaatttagtatgcaaatggaagagtattaatggtgtcttttattttttaataattggggtttttcatgtattaggttttgataccttcaacagtttattcatattttgttgtgggctattttaaagcaaagtttggcaggacttgcctgtctcttttcaggtcatgaaatactgattatatttgatagaaaggggggagaataagaagggcatttctgaaaaatcccagacaagtgcaaaataccttcaggcattccttccacccagcctggtgctcataaactctgtggctgaggatgctaggagtttaaagggcatgtaaaggcaaaaaaaaatcaaatcccatttttactttctttaatgaaaaagaaacctatctccaatatactttaattaaaaaaaaaaaaaaaaaaaaa

SEQ ID NO: 272 - DNA, 3868 bp, Xenopus laevis
gttttattgcgcgacatcatggtctccttcatgctatgaaaactctcaacaagggaattcactggaaagtgggaaagcaagggcagctgggagtctaattggggtcagcagtggctgctaggagcttcattcttattttgatcagaagccataggaaggctcaagagggctctttatgtgcccagcactgtctcaataatctgctacaaggggagtactttagtgctgtcgatttatcatctattgccatgcaactagatgagcaggagcgaatgaggatggcagaaggtggcctagcaactgaagattatagaacattcatgcaacaaccatctggaaatatggatgacagcggatttttctcaatccaggttataagtgatgccttgggagtatggggattagaactaattctgttcaacagtcgagaatataggaaccgtggaatcaatcctataaatgaaagggcatttattggtaattataaggagcactggtttacagtacgaaagttaggaaagcagtggtttaacttgaattcacttttgacgggtccagagctgatttcagacacctaccttgcacttttcttagcccaattacagcaggaaggttattccatatttgtagttaagggtgatcttcctgaatgtgaagcagatcagctgctacagatggttcaggtgcatcaatcgcaacgaccacgtctaataggagaggatgctgcagcaagagaccaacgagtacaaagaagtgaagctggaatagatggtgaccagttatatgattcccctgctgtgatggacgaggatgaagagaacctccagaaagcacttgctcttagtaggcagcagattgacatggaagatgaagaagcagatttacgaagggcaattcaactcagtatgcaaggtgggaatcaaagtgaatttacagaatcactgtctaatactccacagtcctcaaggaacagggagactgaacagctcacatcagaggaacttcggcaaaaaagacaagcctactatgaaaagtttaagatggaacctctcagctcagagggacttaaacgaactacaaatacacaaacagtggactctgaagataatggcctgagtgaagaagacatgttaaaagctgccacaaaaacgtctgtggatacaggggaacaatgctccaaatctgcagatgggaactgaccagatgcttaggaccagacccttgttctgcagttttgtgtgagtgttggcacagatagtgaggacatataaataaaatgttacttttggaccatgtacacttggaagaattcccagtgcttttacgattgtctcttatgatgtacatttttgtttccaaaatggcctttggctctgcactttcccattctgatttcactttatattgtgtcataaataaggtttgttatacaatatatctagtagaataataaaagcttttgtaaggctcctcctcatgaccaaacaaagctttaacataactagctttgacagctgttgtgttttgccacaacatttcactgaccatttcttgtgtgactgacctgttagtttctggagagccatttctagaaatggctttagaatgtatcttggatgcatctggcagtaaaaggttaatggtgcttttaataatgtttacaaacaaattgctgttgttgatgtgtggtacttaactcaagcttagctttgtattatatatgaccgtgcactacaactacttactcagcctgaggagtatgacgtacaagtgatctgggaaccatacagtgcatgaacaactgggtcttaagttttttggttcacatgcatgctttattggatgataagcaatgagtatatacagaacacaaataggaaatgtgtacacaacaattaccattacaaacaagtttctgcaatataactatcacaatttgaactcaagctatactgtatatgttaaatgttcatatttgtattgtattcaggatggttgtaaatatacattgactttgccagaaaactggcagcttgttatatattgaatcacattcttgagggaacatttacttttgcccagcctaaaaacccataagatgatacagtgaaagaaacctgctttaaactatttatatgtaaatgtaggcttgtatcaatattcaaattacatgtaaaatctcccaatttctgtaaaaaagattattcctctttacccctgtggttgttaaagtgacttgtgcgatctgtgaatgtccttcttgtatttcaattttaattgaaataaattatataaaaggtggatattaacagatatttagcacaagtcagtagtatcagagggaagtaaattggggaagaaattttgaaccagttaatggttcgaaaatagatccaattataataataataataatgcacctagggattgattgactcaggaagaattcctacaagactagaacatgtgacggtaaaccaggatttaggatctgatggcattcaccccagggtactaaaagagctcggctcaaaccacttaattttctaggattcgttggtgtctagcatgtcgctgagagattaccaaattaataatgtggtacaattatttaaagagatcttgctatgagccagagaagtatagtttgacattgattgtaggaaaggtttttgggggggtttaaataagggataagatactggaatacatttcaaatcacaatactatgagtttgtgccatcaagtcaatctgattgccctatgaattcgactgaataaacagtataatttgatcaattcaatcaaagattaaataaaaatccatttggcctgtagtctctgcctacattacgaagaaaagtctgcaagagcagtattatgactgtaggttctagctaaccatcctgatttcttatgaattgcagtgcattatgatatgccagcaatgaaggaatgtaacttggatgtggtggagcagcacctaaaacatccatgttatcaattttattaagtttgaccatttggttaaacgtctttatgcaaatacagcaaaagctttttctttttttttttaaataacttttaactaaacataactttttttattcactgtcactgctttgaaaaggaacaaaaaaaagtcctaatggaccatccatttcttatcctcatcaaaaacagcacatatatatttgtgttattttaaaacaacagttttttattaaatgatgtaatatttccagattgtatggtctatgtggtttatgtaaggaaaataatattattgtttttttttttttttatggccacaataattttctactgtaatattagcaaaagatggaaactgaaaacaaatacacttttgactcctgcagtgcaagtgtaaagtgtgcttttatcaataatattgtcacatgcataattgttttcaagtgtaactgccaaaagttcgggaagatttgagagccttataaagatggtttggaaattatgtgaaatctacattcttgatattggttttaattaaattcaccttgctttttacatcatatattattttattatacctctatttccctcaataaaattcttaaaagagaatcccagattagtccagcaaatgttccacctgcatagaatgcttctattgtttgggaagtatgtattgtaaatcttacacgattatttgccaggacttttacaaagcaaatagattttaacaaatgagatgtatgataaagagacaaagttgtaacttgtagtgtgtgtgactgcataccacttttatgtttaatatgttactatccaaagttatgaaaataaaaataccaactgatttttaaaaaaaaaaaaaaaaaaaaaa

SEQ ID NO: 273 - DNA, 2443 bp, Xenopus laevis
gtgtagactgtgcattggcttccaagaaacgtaccatctgatagacatgcctgggattggttgcgtgtatggacaggagttaagctgagagccggcagcattggaatggcactagacgcttcactggaggagttccgcagcagctggataaatgagatccacggggctcctacagcggcggggcgctcagacatccggaaacggaggcgctcggaggaactacctgagcctgaaaaagaacatgaagaggagacggcctggcgatacctaccgggctctcctgcacggaacaatgaagaggacctggctaatcagtacgtggaacttgcggagaagctgctgggagacaagcacaggactatagaaagtgcagaaaggactggcccagcacaggcagagagaacgggaagtctggtggatcagctcattgatgaccttaatgaaatcaacgagatcccgttttttgatatacaacttccatatgaaatcgctttgcagatattcaagtacttggatagaaaagaccttggaagatgtgctcaggtgagcaagtcttggagagtgcttgcagaagatgagttactctggtacgatattggccgatcagaagggtaccttactgaaagcaaccttacagctggcacctcttggaaagaagctctgaaacaaaggcgcactaatgagagcatgctaagagcaaactggaagaaccgcactggggctgtgagccaactgcactacgaactggggaaggtcctctgtgatgttcatacatgcaatggagttgtcattgctgggtatacgtcaggagatgttcggctctgggatacacgtgtctcatgctttgatgccccttatctgaaagcttcccgggactcatttgatgtggcgcaacccccctccgtgtcatttgtgaaaataaatcgatccctggctgttgcagtctatgaggatggtaccgttgatgtttggagcctgcaggctggccaggaacctattcatcattatcagcacaatcagaaaatccaagcactagccctttgcccagaatctgctgctatagcaactgcctcaggatttcagatcaaagtcgagtgccctgatgagagaggctattggcggagcacctgccacttccgcacccagaagctggtgaatttccttcatttgattcatggttctggaggccactctttggccgtagctgctgctgatgaaatggtttacctcttgaaggcaaaagaacctgaacatgtcctgcactctacatatggccaaccagtcacctgtttagatgtctctcctacccatgcagcatttggtgttaaaagctttggctggttctctaatcatggcaacaagattcatgtttataacctgcaaactggccagtgtcttacaactttgggcaactcaactggcgactttacctgcatcagccttaaggatagtcctccgaaccttctggttactggaaacagggataggagggtccgtgtgtatgacatgagatgcagcacatccctctgctctgtctatggccaccagctgggggtgtcagcagtacaaatggacgactggaagatcgtgtctggaggagtagaggggctcacctgtgtctgggaccaaagaatggccaccaaactgtgggagatgcacactagacaccccgtgcgctatatctggttcaactcacacagcttaatcacggccaacattccagatgataagagcccccgaggggccagcatcatggacgatgatcttacagcccaccgcaggcatcgtggcacaattaatgtgtatgagtttttactggatcagaagccaacggagaacatcctcccaatttgtacctcttcctacaatgaagtgaccggttacaattacaacgtgggcctggcagttccatacgacttggtgtgacagatcacactcgatcttccctgttcttcatgtggctggagcccactggatgtttcagggcagctcattggctgacaacctctccgagctgatttatggacagtagcacagtgcaggctgtattgtttcattgtaaatagatttgcttcttatttcattatcagcaattgttttacacatttttatttgtaaatataatgtttttccaattattccaatgaaatgaataggaatcatttcaccgtccactgaagcaattttctttgtgattcaaagtgtatcaagactttttatcaaaagagcagaagcaaatgttcctaagtaagagaatcgtgaggacgatttcccaaagaccaaaatgctccttgccatacacagtgctgctgagagagagtaaataggaatacatttaggggttatttactaaactctgaatgcaaaaatcacaagaaatgtgtgatttgttttttttttatatataaagttggacttttaaaaaaaaaaaaaaaaaaaaaaa

SEQ ID NO: 274 - DNA, 1516 bp, Xenopus laevis
gagaaaaaaaatcttccaccaacaccacagctcccagttttcttaaaaggcgtttatatgtgccagagaaccaaaaaaaaggcattttcgtggttgtcaagacgttccacaaattcagctcccccgcttttggtacagcccggttcgatcactacttccgcctgtaaaactgttccggataactaggaattcctagagcgtcgctttgttttcctctgactgttttctactcctgtatcgcggccccgtgtctctgaatgctctatgtccaacatggcgacgcggctacagcctgaatacgactcttacgccattgaagagcccagtgatgaggagccggccagtagcagttcggaggatgaattggacgtgcttttacatgggacgcctgatcagaagcgcaagatgattcgcgagtgtctcactggtgaaagtgaatcatccagcgatgacgaatttgagaaagaaatggaaagtgaattaagctctgcaatgaagaccatggaagggagttggcagtccattgtccctgtcgcatccacaagtaatggcgctacaacatccgagtccactgcgcaacagttttacgatgatgtgtattttgattcggattcagacgaggaaagctccaatgttgtgcaacagaacaagccaaaacgtaagtcaaagcaaaaggttctcaccaatgatgagcttttgtatgaccctaaggaagatgatcgagaccagaagtgggttgatgcaaggagaagaaggtactggaacatgcgcaaaccaaaacaaacacatccccagcagtccaagcatcaggccatgccacctagtgatgccattttgaactgccctgcttgtatgaccacgttatgtctggattgccaaaggcatgagtcttacaagacccagtacagagccatgtttgtgatgaactgcactgtcaacaaacaggaattgcttcgcttccctgttcagtcttccgcaaagaacaaacggcaaattcgcaaaaaactgaaacgccctcaaacagagactggaacggagaccgaggaaaccgaaatgtatcaccctgtcaaatgcaacgaatgttccacagaagtggcagtttatgacaaagaggaagtgtatcatttcttcaatgttcttgctagccactgctaagagaccaaacactccagggttacatattctgagcatttcactctttcgtctacatacacggtaaagcctgtacctttctttattaacctgctgataaagaacttgggaagtttttcacatttaagcattcatgttttcagacatgaagaagaaaccccagaggcctgtataaaggaaataaggcttgctgcacttctgcaaaatcgtcagatggtggtttgtgtgccttgtgtttataagcattgtatatggggttaggggttttttttttttttaaaggggcctaaatttgtttcttactgttttaatatagactggggtttattttccttagtttaagaaaaataaaaaaaaaaaaaaa

SEQ ID NO: 275 - DNA, 2424 bp, Xenopus laevis
ggggtggattacatggcgtttccatgggtaccaataacgcttgttgtcggaaccacggtagctatccagaagtagcacatatccagtagctggtgtttggtgtcgacgcttagcaagacatgtctgggcccacagctaccgaggggaaagcgaaaaagctgagttctgttgtcactatgcgttctaagcttggaacacattttaaaaaggcatcggtcatctctggatccgtaacacaaagcaaagtaaaccagagtactttcagtcgtagtataattggaacatctagtagaaaaagcttaaatctacatgctgaaagcaaaatgggcgaaagaaacctttcaatggttagcaagcaaagtattaagattttcgatgacgatggaaaagatgtatcccctcaaccactttttcaagctgagcctggaacagtaccccaaaagcaaaacaaattgtttacaccacccgatgcatcaggaataggcgcatccgatattttttcatcaatctctctacagcatactgcatttaatgctagctttgttggtccatttacaaggtcaacatttggtgccagtactgtttcaagatccagcaaagaaacagaatcgatgacagaagatatagaggagactggttttaaacgtgaaattgctagtttatcagaaatacaaggaaagcagcatgagatgcaaccaactgaagaggacttggataaaataattaacatattcctaactgacactgaaacactttggctgctggacatgccacctgcactaaccgcaactgattcagaaaatgctgatttagtcagggtgcgtaatcaagcatatgaagatctctgcaaagacaaagttgggaatgataaatacattgaacgtatgatgcagactttcagtggggcaccaaagaataaagaagttcaatgtgacagaattatcttggaagatacaggggtaatggcatctgtatgggatttatatgattcatatctttcacctgaaagcctaccaatgaaggaagcggtggatagagctattgagacaaaaaatatttctagcagtaggttgagtgaaagcagaggaacacagtctatgaattcattgggaagaggagacagcttttcaagctctatcgctgacatagaaagactggcactcactcgaatcccagatgaagttgagcctgattctgaagaaatattaaaatcggagaaatttctgcaggatctctttttcatggaaagggttgtggtggaaaacacgtttcagtcacggcttgctgcttatcgacagttacctgttatcgcagatcctgatgaggatgaggacaaaatcagtgcaatgccctcaaatatcgtatcacccagtttaaacagactgtggtcttttgcatgtgatgtaactaaagggcataatgttagcagcatgtcatggaataaaaagaactctgatctactggctgttggttatggtcaatttggatttgcagaacagaaaggaggaatggcttgctgctggtcactaaaaaacattatgtggcctgaacgtattttccactgtgaatgtggtgtaacagccgtggacttctctgcagttcatccaaatcttcttgcagttggaatgtataatggtacagtggctatttacaatgtgcagaataatgaagattttccagtactagacagtagtgacaacccaaataaacacacatccccagtatggcaactgaaatggattgagcacgacagaggcaaccttggagatgataaaggagaaatcctggtgtctgtatgtgcagatgggagaataacaaggtggcatattagaaaaggattggactgtaatgatcttatgaaactaaaacgaacagggagtggaaaatcaaaaaagtcaagcaacgagaaagaaagaaaaggagaagcattcatttcccggcaagctcctggcatgtgctttgattttctcccaaaggactccaacatctatcttgctggcacagaagagggccacatacacaagtgctcatgctcatacaatgaacagtttttggatacatatcgtggacacaagggccctgtgtataaaatagtatggtctccattctgcccagatgtatttctgagttgctctgcagattggtgtattcacttatggcagcaagatgtcctgttacccattctaaccttttctaatacgaccaacgccgtatatgacattatgtggtctccttcctctgcattaatgtttggggcagtcagtgagaacagagtggaaatctgggatctaggtgtcagcataatagatccagtcatagtaaatgaagccaaccctggagttaagcttacatcaattttatttgctaaaaatacagactgtgtcttgattggtgacagtgattaaaaataaaaaaaaaaaaaaa

SEQ ID NO: 276 - DNA, 4146 bp, Xenopus laevis
gtgattaacacatgccggaatgctggggaaaataaagcacctggatgttcctaatggaaggatggtgctggcagtttctgatggagagttaaataattcaattcacgatggacgaggaagcaaccacagtctcaacagcctgcccagttcacagatttgtggccttgcttcagagaaatcagtggccagctgggctgtatcatttgagaggcttcttcaggatccacttggggtggagtatttcacggaattcctaaagaaggaatacagtgaagagaatataaatttctggaaggcgtgtgagaaattccatgccatctctaatgatgattcggcaaagcttttgcaagaatcgcgcaagatctacaatgaatatctttccagcagctcccagtgtccagtcaatgttgatcagcaggctcttattacagaggacatgctggaaacgccctccccggatctgtttaatgcacagcaactgcagattttcaacttaatgaagttcgacagctatgcccgctttgtcaaatctccattgtaccaggactgcatgctggcagaagtggagggtcgacctttgcccaacttctcaacaaccaatccagttgcaagctgccatgttcatgcttctggagcagtaaagaaaaataaactgagggctggaaagtctctgccagttggaattgaaggggcaagcttagaaactgtagcagacaaattacatcgcagatcttttaagaagaaggacagaaaaggacattgcaaagaaactttagacagccgcgaactctcatctcgccgggaatcatgggtatcacttaactccaataacagtctggagctgagtctcaactcttcactgacaagcaaatctgagaatgaaggtgggagcacaggcagcacagacccggaagcagatatcaaatcaataaaatattgttgtgtctatctccctgatggcaccgcctcactcacagctgtcaaaccaggtttaaccattcgggacatgttggtcggggtttgcgaaaaacgtggatactgtctcaccgatgtgaaagtgttcttagtaggaaatgaagagaaggccttggccctggatcaggagtgtttggtactaacagatcaggaagtgagactggaaaacaggataagcttcgagttacagatgaacccaatgaataaaagtattcgagttgtgtcaaaacccactaagaccatcggagaggccctatactcaatactaaagaaatatggactggagaaccacgagattgttctcactaaggctggacagtcccatgcattagatcaaaagagctctgtgaatgaagtggcagggcagaaactcaatttggaagttgtcaatttcagtgatcctaagaaagctatgggcactacagctgagcatcttacaaagaaacactctacaaaggaacacagagaagacaaaggcattccaatgacagaaccttaccacagggcaaaaaatgagcctcataatgggaaccaagtctcatcagaacacaggcatgcagaggctccacatgggaaacataagcctcatcggcataaatatgatattgaaggattggttgagttgcttaacaaagtccagagctctcgagcagatgaccagcgtggattgctctgtaaagaagacttggtcctaccagaattcttgaaggttcctacagacaaggaatgtagtcactgcagcatggccaatgctgatgaatcggcagttatcattacgaatgtagtgtgcagcctggatctgtcacaagcttctgaaagttgcggtgaacgcaactgttccacaaactccatatcatcagcatttaaaaaggagtgtttagcagagtcacaggcaaacactgcaaaaggcgtagcaccccttcatgctgggacacatcgaaactcagaaaggataccagaggttattgtttcggattctgcctcttcacattatacttcagcaaagaagccaagtagtgtattgcaataagatactgtttggtttaatcaaaagacataaatctaattgtctgtataaactcattcaacaagactacacagagcacacaggatttaaagatgtacctgagactacatatgtgacagaagataaaataagggttgcatttctaataatagtttctcatttatgaaaagtcacattagcctatttttttaatatttatttgtgtgacaattttttttcaaataatttgtgtgttttctaaagtatattcaactttcccttagagtttttcacctaaatgtgttcactgttcagcagctctgaggaattaaaagctattatagcctattgccaaaatagcttgcacatcagtggatcaaaaaacatattttttatgacaaggaaaaatccttagaatttgtaaagagtcattcacacaggaaaaaaaacccttgttaaaaagtagtaaattaaaaaaaagtgtaaaggtgcgttgtgtagaaatttgccaaatctaaattatgttagaaaagttttctaaggctatattaggagtgaggggatcctgggcattactagtaggttaagatgaagtttaaaacaaattaagaaattatatattatattagattatatataattatttaaattaactaaaacccccagcatccccccctcatagcaaagaggctcatgacattctggggacctgttgaaatgccctcactgctttaccctacaatcagtcttgaattaccattacccctgaagtgcattatcatatttcatgtttctaatttgctaaaactaaaactctgagcaacaaaacaacgcgttacaatcaagtgtcaattcgtatcatatgattgacatttcgaaaaacaaaatgttatcgtgtttttactttttccaattttagaacgaacacctagaatgtttggtattatccagcacaatgtcaagaaataacttaagggacatctgccattgatgtctacatgacctcgacaggtttgagttttttcagattcggattttaagcagctttgggggtattataaatctctaaaaataaaaagttttttccccaaaaaaccttgaccagaaaaaattgaggatttataaatgggccctttagtaagctttaatgataagtaggtaaacatctcctattggtccaatcactagtgtgtgcaatctgacaaagaggctgaaccaatgtgctcaggagaagatccttatagaatgcatttgccctagagcagggctgtccaactggagatccatgtgcctgatatggcccttcaagagatttgcatagacctcagacttctcaagtgctctgtggatctcattggttaacattatatttttttataatatgaacttcgaacatctaggggcagatttactaagggtcgaagtgaattcggagtgaatattcaaattcaaaaacttcgaatttcgaagtaatttttgggtacttcgaccatcgaataggccaaattcgacttcgacttcgattcaaagtgaaaatgctttgactatttgataatcaaagtactgtctctttaaaaaacttcgacttcgccaccttaaacctgccgaattgctatgttagcctatggggacctcctagaacatatagccaacatttggctaagtttttagaagtcgaagtcaaaacgaacgattgtacgattaaatcgttctaatcgttcgattcgaagtacgatcgtagtatgatcgtagtaagatcgtatgatgttaaaaatcctacaaattcgacttcgaatgtctaactaacctattcgatggtcgaacttcgaaattcgacccttgataaacctgccccctagtgaataactggccccatgtctaaatgcagttagaaagcactgccctaaagtacaatgtggtcagccttcatataaagcaaattaagaactaatttgttgctattaatattattacatatactgtatttgtatttagtggtactaatttgagacgtagagtatataatataaattgttagaaaaatgtacttgtccaaggggacaaataggagtcatgaacagaaccccagtcataagcaatattaataatttatatatttctataataaaagcaagatatgtctaatgtcaaaaaaaaaaaaaaaa

SEQ ID NO: 277 - DNA, 3925 bp, Xenopus laevis
agagccggtagttgagtagaggaatccctgttgctgtcactatgagctctcccaggaatggatacagggatcggctgatcctcgctgtggatgtcgggagcagcgtgttgaggtgtcacctgtacaaccagtcgggcgagatctgcgggagtgcagaggacaagctgaaagttctgtatcctcaggccggatatgtggaaatcgatcctgagtccttatgggagcagtttgtcagggttgtgaaagaggcagtcgcagatgcagggatccagatgagtcaagtggctggtcttgggatttcaacacagagaggaacattcatcacatggaacaagaaaactggagaaacttttcataacttcatcagttggcaggacctacgtgcagctgacctggtttcttcttggaaccgctctctgctgctcaaggctgttcatggggtttgcacggccttgcatttcttcactcggaggaaacggttcctggcagccagcttgatcaatttcactacacagcatgtatctctgcggctggtctgggtcttacaaaacattccacaggtgcgtcaagcagcagagaaaggaaactgttgctttggtaccatcgacacatggctgctgcataagctcactaaaggcactgtttttgcaacagactattcaaacgcaagtggaacagcagtttttgatccttatctaatgtgctggagctcttttctctgctctctgctgtcgattcccttgtctatatttcctcctgtggaggacacaagtcacagcttcgggcttgcagatcctactatatttggagctccggtgcctatccttgcattggtcgctgaccagcaagctgccatgtttggacagtgctgtttcgatgtggggagcgtcaagttaacgatgggaacaggatcattcatttctattaatactggagaaacacttcacacatctattgcaggtttgtacccgctgattggctggaaagttggtgacgaggttgtgtgtttggctgaaggaaatgcctctgacactggcaccgctatcaaatgggctgaggagctaaatctcttcaccagtgttgccgacactgaggcaatggccaggagcgtccctgattgcggggggatttaccttgtaccatctttttctggcttgcaggcacctataaatgatccctacgcctgtgcctcattcatgggcctcaaaccatccaccagcaagagccatctggtgagagccatcctggagtcagtggcatacaggaataagcagctgtacgacactgtgctcagggaaaccactatccccatcacacttatcagggcagatgggggtgtcagtaataacaacttcatcatgcagatgacagcggatttacttggtcaaactatcgacaaaccaaaacacacagacatgtcttctctgggagctgctttccttgctggtatggctgtttatggtccactaaagacgagctaaagaaactgaggacgactcaatgtgaatttgaaccccaggctaagtggaaagagtatgagcggtctatgggaagctgggaggtggccctgcagcgttgctccaactggtacaataccacggcatctaggaagtccctggcgacatggtttcagccaattagggtctggaatgctctgggatgggttttttggttggtatttctactacttctgcacctacgaaccagtttccctgttagtgaattgctatgttagtaatcccctatatgtgcctcaagtcacactcgctagactgcactcccttttctgttctctaatgatcagatgttaagcaccaggaattctgggaggtccatagaacagggcagttgggtgactgttccataacacagtacagtcttgttattattagatctaacaattcatgggccacattaaattctactgtacagttcccactttcacccctgtaaagaggtaagaggatggcaatgatcatcttctatatccttgcatgacacataccctagccagtggaggagaatataccgtatgaagagcaggaattctaatgcaaagggattgccccatatttagaatagggaacatatccaacagaaataaatggaatttgttatatttgtttttatcttttattgtttttaaaagccttaaaactgatggtatagcaagttgtagagccagggagaagcagatccgctacccttccccagttccattcatgtgtagtgaaaagtgcaacttccactttgtgtgcaggcacgcagcgccgaggtcgtcccgaaaatgcctactttcacatagggagcggatctgtttctctcagcctgcataacaaaagtaacaaaatgctgggtgaaagcaaccaagccaaccctatgtgtgcctacgagcctacgaacaaacacaaaaaggttcaaagccccctaacctgcttctgcgtatttcaaggcattatactaactaatacaggtatggaatctgttatccagaatgctcgagagctgcggttttccatagtttggacacataaacattaaaggaaacctatacccccaaaatgaatacttgagcgacagtttatatcaatttaagcggcatattaatgaatcttcccagactgatctatatatttaagtaaatattgcccttttacatctcttgctttgaaccaccattttgtgatggtctgtgtgctgtttcggagatcacctgaccagaaatactattactttaactgtaacaggaagaagtgttgaagcagaagacagaactcggtctgttcattggctcatgtgacctaacaagtatggtttgtttgtgtgcgccaagaatcctacgatcccagagggcggcccttctttttttaaaatgacagttttctatttatgattacccaaatgcacatactattaaaaagtatattatcaaaatggtttatttacatgaagcagggtttgacgaatgagctgttttatgcgatatctttttatagagacctacattgtttgaggggtatagttttcctttaaataaacccaaagggctggttttacttccaataaggattcattctttgtcgggatcaagtataagctactgttttattattccagagaaaaaaagacaatttttttttaaaatttggataaaatggagtatatgggacatggcctttccgtaatttgtggataatgagtttgtggataactgttcccatacctgtatctcaatgtaagcaagctgctactaacacataagcatttgccattcttccctgctaaataactctgctaaaataccaacaggggatacatgacttgtgtattagtacatgtaggtacaagtataaaattgctaccattcccacatcaagataaaccccatatagtggtcctacctgttacctctgctcatatccatggccagttgcattattgtgaaaaatatctcctgaccaatccattgatttttcattctgatctgcccctgctgtaacttataggggagagatctccaagacaagcaaatcgattttaaagccctatgagcgccagtataggaaagggattgtctacttccttcagaataacaaaagtacaaggggggagcactgcaatggtaattaaagaaatgatcctcttcaacttgactcccagcttaggacatactgtattgtatcaggggggacaatgtgcataaggaatagggcaagtcttttagaacctcttctggctacctctgttatgtgatgtttatattaaaaatagtggtgtaatgaagtaactggaccttatataatcactgtgaagaaatgaaatgattttgtaacaaatgcagtttattttgtcagtcttttgttatctttgtaaattgactgttttgaataataaaaatataaataaatggaaaaaaaaaaaaaaa

SEQ ID NO: 278 - DNA, 499 bp, Xenopus laevis
gcagagagagaaagagacgtggctgaagcaggatagttgaaagcgaagaaatggagttggaagcgatgagtcgatacacaagcccggtgaacccggcagtgttcccacatctgacagttgtgctgttagccatcggaatgttcttcacagcttggttctttgtctatgaggtgacttccaccaaatacacaagagatgtgtacaaggagctgctcatctcgcttgttgcttctctctttatgggcttcggagtactatttctactgctgtgggttgggatctatgtttgaccaagcaggtgtctcccaagagggaggtttgattatttttacgctgtgtgtctggggaccagtacttgtcgtggtttattgcatccactcatatcattgcactgtcatttcagcgaaggagatttctacattatggtgaataactcacaagttacaataaaaaaaaaaaaaacaaaaaaaaaaaaaaaaaaaaaaaaaaaaaaaaaaaa

SEQ ID NO: 279 - DNA, 952 bp, Xenopus laevis
cccacgcgtccggtacagcgctcattggctgctttaaccagtgactgttcttctgtgtgagcggaatcggagtgcaggatgttggttttagtattaggagatctgcacatccctcaccggtgtaatagtctgcctgcaaagttcaaaaaactgcttgtgcctgggaagattcagcatattctgtgcacaggaaatttatgcaccaaggaaagttttgactacctgaagaccctggctggggacgttcatattgtcagaggagactttgatgagaacttaaattatccagaacaaaaggttgtgactgttgggcagtttaaaatcggtttgattcatggccaccaagtaataccatggggtgatatggctagtctggccttgctacagagacagttggatgttgatatcctgatttctggacatactcaaaaatttgaagcatttgaacatgaaaacaagttctacattaacccagggtctgctaccggagcttacaatgcattagaaaacaatattattccctcctttgtactgatggatatccaggcctccactgttgtcacctatgtgtaccagttaattggagatgatgttaaagtagaaagaatagaatataagaaatcataaaataaaactgccaactgtttcatggccttgatttttttcattccatttatttaactaagatggtcatgacatatcctgcaacagctataggcagataataattaactctgtactaatgtttgatttataacttcctccgaatttgctgcagtaggcctcttgtacatcaaataatttgtagcaaattgcgtgccatgttatttacgttgtaaaaaaaatatcgacctgtaaatatcaaatgctaagaatggtgtgctactgtgaagaaatagtatgtattaaaagtttataatccaacaaaaaaaaaaaaaaaaaaaaaaaaaaa

SEQ ID NO: 280 - DNA, 1399 bp, Xenopus laevis
gggatagaggtgggaacggctggactatacagactgcaggagcccaggaactatgagccaaattggggattacaacgaggttataatgggtgcaccacaggaattgttctacagattccagctgctccctgttcatgggattccctttatgaaacccattgcagataactgggataggatagagacatttcaggccaagccagatgacctcctcattgcaacctatcccaaagcaggtaccacctggatgcaggagatagtggattccatcatgaacgctggagacctgaaaaaagtaaaacgtgcccccacgcacgtccgattccctttcctcgaaatctgcaacccttcacctgtcccttgtggagtcgatgtcttggaagagacacaatctccacgaataataaaaactcatcttccttatgaactcatcccgaaatccttctgggaacatgagtgcaaggtgatctatgttgcacgcaacgcaaaggacaatgctgtctcttattactactttgatctgatgaacaagactcagccgcaccccggcacctgggaggaatatgtgggaaagttcttaaaaggaaatgtgccctggggtggctggttccatcatgttatcggatggtggaaagccagggccaaacaccaaatcttgtacgtcttctatgaggacatgaaagaggacccaaagcgtgagatccgcaaggtgataaggttcctggggaaggagttatctgaggaccttcttgagaagatctgtcagcacacctctttcaaggccatgaaggaaaaccccatggctaattacagtgccatgccagacagtgtcttggaccagtccatctcaccatttatgcggaaaggggaagtctctgactggaagaatcatttcactgtacagcagaatgagatgtttgatgccgagtaccagaagagaatggaaggaacggacctcaaattccgttgcagtatctgagcgcgtcaaagactcagaggagaaaggagatttgggcaggaactattataggaagccaactcaactctatagatgaagaaagcttaatagaacaagggatgtaacggcttgatatgtccctgtcctgccaagccaatatatctgagcacaaggcaacaccaacatataacaaaggataaacattgcaatcatgtgaagagtcagattgtggggatccctatcaacagggggtgatcagtgattaattggtgaggggtagagagattttaccatcagcattggaagttttctgaattgcaaggaaaatcaggttatggagttttcatggggatctggtatttcttatacagtatgttattgaataaaaactgactataccatctaataaaacaaattaaggtgaaaaaaaaaaaaaaaaaa

SEQ ID NO: 281 - DNA, 2711 bp, Xenopus laevis
cccacgcgtccgattcagtgtaatcgaatggtaaaagctgaattctgtttgctttgttaaactaacccaggtatacaagaacacagtcttggaacttcacaggaatagccaacatttttgaaaatcttggctttgcaaaaaaaaacggatacttggagaatcttgggctgaaaaagatataaggtggaggcaactggctattatgatccaacctgttcagtagaaaaaagaaaagaagaaaaacatggattttcgaaacatcccatcatgttctgaagtcagctgttggagcccagaagctctcattgaatattttagagatcacaaccttcgtgactgtgaaaagttggttaaaaagcaaggaattactggaagacgatttttggaaatgacagaaaatgaaattcagaagtttcctaaattagcagtaccaatgctgataaaaatccaacagcacatgaataagaaagacgagaagaggagcttctttcaaaaaagggcagcaatcccaagaattccacaggaaactgaatttattcccgaagacaaagagttttccgactctgactcatttgaggaggattatgaaagtcccaatgagtttgatgatgatgacgactatgaacgcccagcatcagaaaatgaagatgaagacggaaatggagactatgagccgcctcctcccaatattgaagatactcatcctgccatatgtcaaataaagccaaatgcaactaactcaccctatgcagacagagagtttggaaattctatgaaaaatcctccagagcccccaaagaggccggggaatccagcacctcccacaaacaggggccatacttttccagggtattcaccctcatcaaatcaagaaaacagatcaaacacacttggtccaagcatcgatcgtagaaccaagccaagttttgaaatcaactgtccaccaaatgttggcagagggattggggctcaagggaagaaaccatttattccaggaaagattctgcctggacatgcaggtatcggacaacaggtacctgagaaattaccaaatcttataaaacctcccattcccagtgaaagaaacaatcagccatttgaaaggaaaatacccagtccaagacccagtttacccatggaaaaaagattcaatcctgaagaagatgcatccttgcggcaatttccttcaccgggaggccctggcttctcttcaaatacatttcctccaaggccctctgcaaagaattcatttcctggattaccagttacagacggtccaggtctaccaggaccagcacctccccctcataaaccaggtaatatgaaccggtctttctcagaaggaacatgcaatggcaggccaccagcacctattcctaccaactataatcagacaacagaaaaagagagcctgtcacaagaccaatggtatactggtaacatttcaagatccgaagctgaaacagcccttagatccatcaatcaggatggaacatttttggtgagaaacagctccaagtcaacagcgtcacatccatatgttctaatggtgctatacagaaacaaagtttataacattcagattcgacaggaccagacaaataatgtatacatgctggggagcggactcagaggacaagagacctttgcttcggttatggaaattattgactactttcataaaacaccacttctccttattgatggaaaggaccaaagtttgaggcaacactgtgtgcttacagtttcagctggttgctgcctaacttaacaacaaaattgaagtcataatttgataatttgtgaatactggtccttctcaagctttccaaatcatttcaaggataacacataaaacttcctttttttactatgtttaacttgttttttctttttttttgtactcatccattttgtttccattgttttaacatgaagatttgagaaggctggaggcaggtttcacatcacattgttttaatccattacaatatggtggtaaaacaaatttgctccaacagacttggcaacatgcaaagtgaatatacaataaaatctaacttgtgttgtgaaatgtatcaacagttctaataaatgaataaataaaaggataccacaacctgctcccatgaactgtgtgtaatataagttatgactaagtgacaaaaaagtgcctgctataagggatttggcacagaatgacgtcccttaagaggagacaggaaaaaaaaaaccttgtggaaacctatattttagtctttttgttatacagagtaactggtatttttgctaggctgttgatgacattagagctcttttttaataaaaaatgtgtgttttatctgtacataaaatgaaatcagttagataacacgggcttggggccacataaaacaaacctgagaatgattgcactaagtgtgaaaagagtttctattaataaacaggtcgttctgaagccatttaccacaacagatagcgatgaatgggcatatgcaatacacagagttcgctcaagctgttattaaatgcccagcactgaaaaaatagtcagatattctcatgaaagcaatgcacctgcattcaccaatcagtgttgtactagggctctgaactcactttactttgtcatgttacacaattatgtttgtatggacatacttttttgttttcaatgaaataaatctatcattaataaaaaaaaaaaaaaa

SEQ ID NO: 282 - DNA, 3356 bp, Xenopus laevis
gactagttctagggcggctactccagcctggcctgtgaaaaatggcgtcaggtggaggaggagtttcaggcaccagcacaccgagtggttcctcggagggtcggaagagattcagtgaaatattccgagattttgatgcgctggagataagcctcggaaatgagacggtggaaatgttcttgaatgattcagagcatttggaactccacccagacgaagaagaggagtcactgatcagcacaccgttggagctatcacgggcatcagttgatcaaggagttgaggagactgatgatatcctgctgcacagtgaaggtggagtggagtcagcactcaactatgcaaagcgttggtgcaaatatgtgagggaggtgttgggttatatggagaaaagactcaactatgaacttgaatttgctaagaacatcactaaactggccgagtccaccagattcattttcacccaacaggcatccatgcctttacaatgtgtctacctcttgctcatggaccatgagacccagacagcgaacgctgctcatgatacggtagcccagttacagttgaagaaatattgccagccgctgtctgcaaagaagacagaaattgaaaaatggaggaaagaatttcgggagcagtggcagagagagcagaaacgaatgattgactcgtgtgcggcactgcgcaagtctcggcaactatacattcaacgctgtgatgacctagaaaaggcaaagcaactaagtgcaaagatagaggaagaacagggtcacacaggaagtgcaaacaaacttgtggaaaagagaaggaagtcccgggaggaggcccagtccaaggccacagaagcggagatggcatatcgttactgtgtacaggaggccaacgctcgctctcagcagcaagaaaaggtcagagagagaattgtatcgcacattaggaagctgattatccagggggatcaagtgctgaaggaggtgaccatgaacctcttgcgtatgaagcaatcccagtgtgaggttatcccttgtggttatggggacctgctgactacgtgcgacccctatgagtctgggactcgatacctgcagttcatattgactctgccacggaagcacacagatcctgaacggttcaccttcgaggaatatatcccaacaggacaaaggtcaccatctgttggtagaaggaagaatgcagtgcagcttgtcagagtctcctcgtctttatctgacctcaatgtaaagaacgaggatggaacagtaaagatgtatgcaggggaaaggggatcatggggcagcaaatttcccagcagtgattcagagagcatgggagctaccagcgaatccagatcccaagagtctacaagcgacagcccaggtgactttgctagaagagtccctaaagcttcctccacaggtactatgtcttctgatgatctggatgaaagagattccttcaacacagaggatgttgattcaacagatgccaattctgagaatggtttgccactgcagagcatggaaaggctgggggttctgtctctggctgctcaaagtcatcgtcttaagaggacaagagttcccagcaagtgcagggagtgcgagaactttatggtttctggtgtggagtgtgaggagtgcttactgacctgtcacagaaagtgcttggaaaacctgcttataaagtgtggtcatcggaagcttcctcctaaagttcccctgtttggagtagacttcagccaatttcctcggtactttccagaagaggttcctttcatcattgttagatgtactgcagaaattgaacaacgggcactggggcaacagggtttgtatcgtatcagtggagccaaagctcgggtggagaagctcctgcaggcatttgagaatgggagagaactggtggacctttcaggccattcaccgcatgatataacaagctcactcaagcattttctaaagcagctcccagactcagttgtcccttatcaactttatgagcaatttatggctttttcaagagactacctggaagacacaaaggagaatgaaactggccacagtgctattcatcaaatgaaggaacttctgtgcaggatgcctcacagtcactacaacacacttcgtcatctcacagcccatctctacagagtgtcagagaggtttgaggataacaagatgaatcctaataacctggggataatctttggaccaactctaattcgtccattgcctggtcaggacatatcagtgaactgtctgattgacactgggtaccagtcacaggcagtggaattccttataaacaactatgagaagatctttgggatggatgacttaccctctgccagaccccagaattcagaagaggagccagcagatgtggaaggagcagaggattcaagaagaccctttgatgttaagggtgtaacagagacttcatcagacaagggtctatcagatgctgacagactccaagaagaggtggaagaagaccaagaggtggaaaatgccacatattccaggaatcactttagtcgcttgccgataaggcttgtgcgtatggaacagtcaaagactgaaggagcagagactgatggagaagccgagggtgaagaaggataaagtccaggagccatctctgactttatgatctgttgtatgatctcccagagaattctgggaggtgaagtatgagtagatggctttatggcttgacaatggctctgtatttagatgtgtgtatatatcttaatgagggaactgagaaacaaaacaaatcccttctttgaattatttttataaacagagttcagcccgatggaaatgcactatgaaaccaaagagattatgactcctagctgtgtggctgttgcacttatccagatccctcatccagattctctgcagtattttctcatttgtaaatcactgaaaataatattgctattctatattaaatatacaaataaaataatacacatgagcctgaggcctgccatggaatgaagaattgtgaaggaatagaggctttgctaaacagccaagcacaataaatgtatattttccaaaataatgataagtaataaatcagtttcatgtttccccatagtcttcacagtgatagtggccgtgggataatgggcctcaaatgcaaaggtttgggctttgctctgcatcccctgccagattaaagttcaggcatgaggttaagagttggcacttcatcgaaatgtttcatgcaagaattttgcagtgttcactatatccacaagatggcactaaatatctttagaaaatgtttaaacggtaacaccaaaaaataaaagtattttaaagtaaaaaaaaaaaaaaaaa

SEQ ID NO: 283 - DNA, 1984 bp, Xenopus laevis
gggaggcagtggatggagtagaggggaggccgcaggctgctgctgaggagctggacccgaaccactcggagaagtcggaggatcctactcggagagtctggggcgcctgttccctccctcaccagagctgcagctgcacgggctcaatatgcaccagcagagaactttccctgcactgagctgaccctctgcagcattacttcttctacttctcctcaactaaccccgcccctttaaccctctcctgcaccccctgctccagccctgcaccccctaaactctgctgctctctgcccccctgagatcctgccttagagactgtgggaaggaacatctgatgcctgtacagctgcacccccctctgccatttcatgtagctggcaaggagcgcaggttgtgttcaaggcctcagagtggagccccctggtggtgctggacgtggactggccccttgtcatgcccggtggaaggaggggtccaagccggcagcaactgagccgttccgcgttaccctctttgcaaaccttggttggtgggatgtgtggcaatggcacagggctgaggaacaggaacggtagcgccattggcctttcggctcctcccatcaccgccttgattacccccgaacccgtgcgtcactgccacatccctgagctgccggtggacggaggcctagtattcgagttcctcttcttcatctacctgctggtcaccctgttcacccagtacatcaacatctacaagacagtgtggtggtacccctataatcaccccgcctcttgcacctctctgaatttccatctgatcgattaccatctggcagcctttatcacagtcatgctagcccggcgcctggtctgggcccttatatcacaagcctcacaggtgggaacgtcgtccgtggtcaaatactcggctctgatcattggccgcctggtgctgctcacgctgtgcggatggatcttctgctggactacggtcaacctgttccgcaatcactcggtgctcaacctcctcttcttgggctacccgtttggcgtttatgttcccctttgctgctttcaccaagacaaccgctcccagccgctccctacagactgtggctacctggtgcccgactctctagtccatgaaggtgctaacggcgtggggggtctcgtccgacccaaagatttcctctcactcctgcgggaatccctgagggagcagttcaacagccccccatctatcccgtctcacagctgccccctgtcccccgacctcatacgcaatgaagtggagtgtctgaagtccgacttcaaccgcaggatcaaggaagttctcttcaactccctgttcagtgcctactatgtggccttccttcctctgtgctttgtaaagagcacccagtattacgacatgcgctggtcgtgtgagcacctcatcatggtctggatcaatgccttcgtcatgctgagcacccagctcctccccccaaagtattgcgacttgttacatagatccgcctcccacctgggcaagtggcagaagttggagcatggatcttacagcaacgcaccccaacatgtctggtcggagaatacagtatggccgcagggagttctggtacgacacagcaggagtttatacaaagctgtgggctcgtataatgtagcggtgccttcagaaatctctcacgcaagattttatttcctctttcaccggccgttacgactcctgaacctgctgctggttatcgagggcagcctggtgctttaccagctctactcgttgctgcgggcagagaagtggaaccacacgctttccattgcgctcattctcttctgcaactactacgtcctattcaagctcctccgggacaggatagtattgggtcgggcctactcttaccccctcagcagctacggactgaaacctcactgagacggtggggcattcgctgaacgcaggagatttgataggaaaaagaaaaaaaaaaaaaaaa

SEQ ID NO: 284 - DNA, 3972 bp, Xenopus laevis
cccacgcgtccggttaagtctagagtcttctcttagttgcctaggtagaggctgaaaggagaacaaagcagtagatactcagcatccctaagagctactcatacgtcttcagttcaatggtcactacaatcttttacaagtaagcagtttcactatgtgactatccactaaaatcagcacagtgattattgactacaacgcccgacacaatgagcatcacagcatccacttgtggcagcccaagctcttctgaaagcctccctaatggtgacttgttcaaagaactttggtcaaaactgaaggaatgccacgacaaggatttacaagaactgcttatgaaaattggcaaactgaagaaagaaagatgtcttgatgcacaaaggctggaagagttttatacaaaaaaccaacatctaagagagcagcagaagacactgcatgacacgattaaagttcttgaagacagactccgagctggactatgtgatcgttgtacagtaactgaagagcacatgaggaagaagcagcaggagtttgaaaacattaggcaacaaaatcttaaactcatcacagagctcatgaatgataagaacgctctccaggatgaaaataaaaggctttccgagcagctccatgacatgcagaaaaataggcacaggcggaagagcgatgaagagaatccagcagatacaggagatggtgaagatggtgttatccctgactcaccacttagtaccttttctctgagcatggtgagcagaatgcggagaaaaaaagagaacaagcacgtccgttacacggaacaaacacaagaagacgcattgacatttgatcgcaagatcagctctgggaccaggcctcaaatatccactcaagtcaacatgagaaaaggagaggatgtcttggtggctgaaacactagaacttgcccctcttccaaataaatatgaagtgtgtacagagaagccggtgttcaacctggcgactgttgttgcagaaacacttggccttgatgctatggaggaatctcagtcccagagtgtatttaatcagccagggatcacctgtgccccactgtttcataagagtgaagattcctccccacggcaagtcaaagttgaattcactgaaggttctatggaagggtttcagactaacgatgatgacacggaatggaatagaagggaagcatcacctgtttttggagaacctgtgagaaacataaggagaggcacagacatggactgtagttctccccccttaccagttggattgagcagcaaattgaaatcccattgttctagaaatgcaccagatttttctgtacatgcaaaggcagaagatggagcactgttaactcgtctcagccattgcatagagacagattccgtaattagccaatgttcaagcaacaggcaagatgtcttgaggcccagtccaaacaaatcagatgctcagatgggcaaatacatttttgacagtgagcaacataagcagacagggaacagatatggaaaaagaaaaaatgcggaagcagagcaagaggaaagctgtgaatcctcatttgataaagaaaacaatatccctctaaaagacattagtggagcaagacatagcatgctggacaagccccttgatctttctgaccgtttttcagtgctcagaccacaggacagaagtcatgaaagcagcagtagaacaaagctaaccatttcactggtaccagagaagcctgacaccaaaacaatattgcacatagacttaaaggagaaccttcaccagcaaacaagacagaaaaaagtatttgtgtctgggttagtagaacatagtgccttcaatttgcatgaagataatgaagtaacagaggaagacaataagccttttcatgattcagagacagaaatcatgtgtcatgtgccaaaaagaaaaccaagagcagtgcacagaggtgtacagccgacatctgtccttcagccaaacctacatatggttcatgcttgcctggaatctcaagggaggccaccaatagataacatgcagtggagcattgatccaggggctgacctttcacagtatgaaatggacatgaccatggaagattctaagagtgggagccctgcaaagccagagctggaggatatggattacacgtatgtgaatgaaagttgcctgttaaaattgaagatgggggatccagatgacagtgaagcagaaagcaaagatcaagacagctttggagagatgtttgacaagactgagtatggggaatatgcgtcgtacattaaagacaagagcccttcccaaagcatcagttgcaaagaaagaagcgatataccttctattgagaataaaaaaatcacaagtgaaaaagaacatgaatctaaaggagagccctatcagaagcagaaggcgtttgtggagccatatttccaaagacctgaacgaaaaaagcctgcaattgattttcctcacattgaagttgttcgcaacaaagaagagagacgaaaaatgcttgggcatacttgcaaagagtgtgaattatactatgccgaccttccagaggaagagagagcaaagaagctggcttcttgctcaaggcaccgattccgatacattccaccaagcacccctgagaatttttgggaggtgggatttccttctacgcaaacatgcaaagatagaggctacattaaagaagaactctctccttgccaacgccctcgaagaagacaaccttacaatgctatatttacatcgaagattaaagagcagaagacctaaaccccacaacaactgttttatacctagatattcaaatatcagattttaagcagtcttgcatattaagcagccttggctaattatgcaaagttttagctctaatgtgagtacattctgagatgaagggttatgtcttcatgagaatttcacatttaaaggagaactgctgttgctgtatgcacccaaactgttatgaatgtttaataattatttttcacaaataattattttttccttatagtttttgagatgcttattagagtgcttcctcaacctaactttctcctactgtaagcacagttgctaatttctgcctcatgctagaatcagacagatagagcagttaatgagcaacacaagtatgttgtttgtagctggaacaaaataatgtttaggtttaggaaaatggttaactacttaaagacagaattaacaaagattatgcgtgaaacagatttattaaccatccactgcaacttaattatttttataattgcagcagtttccctttaacagagtgcttaacctgtgtcatgcacagagtgatgtaataagctttttgtaccagaaatatatgtcatttaaaaaaattagatgtatgtaattgtatctgccttcagatatggaggaaattacttgaaatgtgttagggatttgaataggctcatttattagggagtccatgttctgtttaggaagcagcaagggcagccagtatccatacacttaacttacaggtttggtgtgtcagtgtactcatgctgcacttcttgtcggtccaaagaaacctttcctaatatggacctgacttatgacttaaagtgattgtcagcacttgctttgcaacaatgcttcaaacagtagttgcaatgctacgttttagagggtagatgtgaaaatattcaccactatatatactttttgcatctgccatggtgggggcattcactataacagtgaaataatggactttgctatggtacggagtcccaggtagtgcactttctacttctagaaacactagaaatgtctgtttgctttttcaccagttcgcaaccaaaaaaaatatataaatggggtttttagcacctttttaactagtagggtgctgtgttttgcactgttgaaataaataaagatttgtaatacaagtataataaataataaaaatgtgaacaaaaaaaaaaaaaaa

SEQ ID NO: 285 - DNA, 3218 bp, Xenopus laevis
agcagctctgcgctctcattcactgtgaggggtgaaaagttctgccgacagtctcattgaggagagagacatctctctgattaacttgtctgtctctgcaacaccccagcactaaggatgacggtcacgctggactttgaagagactctcacagactccccccgcacaagggcagctatggaagaagttgagtctgaggtctctgatctggagtctcgactggagaagttggttaaactctcctctcacatgaatgatggagggcgccagtactgcagctccagccgccactttgtagacgcactacgtgatttgtcccaccactctcggaaggataccatactgagtgaatgtttggagaaattttcagatggactctcgaagatcatagacagtcatgtggaacttcttgagaacattcagtttagcttcaaacaaagactcctgctccttctgaaagaagacctacgatctttccgagacagtcgcaaggagctggagagatgcagggaaggtttggaaagtgcactacagcacaacgcagagactcctcgtaggaaaactcaggaggtgcaggatgcagcaactgctgtgctgggctctcgtagaacattcagagacagagccttggaatatgctctgcagattaatgtcattcaaggaaagaagaagtttgacattttgcagtttatgctgcagctgatggacgcccaggcctcgttcctgactcagagccaccatgccatgcaagccctccatcagtatcgcaatgatctggccgcacaggtccataggtcggtgctggaagctgcccgggagcagagagacatggaacagaaattgtccatcttcaaggcgaaggacatgtccgacgaggattccgttttgcagggggaggatgcgagttcccaagttgtgattgagggatatctcttcaaaagagccagcaacacattcaaaacatggagccgacgctggttttccattcagaataatcagctggtgtatcagaagaaagtggacgtcctcactgttgtcattgtggatctgagactttgtgcagtgaaactgtgtccggaggcagaaaggaggttttgctttgaggttgtgtctccagccaagtcgtgcatgctgcaggcagagtcggagcgagtgttacagttgtgggtcagtgccgtgcagagaagcatcacaacagcctacagtgacaacaagagagaaagtggcagtctgcgtctgccccattcccctgcagaggcccctgccaagcagaagggggttcagggtgcccaggatacagttctgagggtcccagggaacgcctcctgctgcgactgtcgcactgctgaacccgaatgggccagtattaacctgggggtcacactctgtattgagtgcagtggaatccacaggagtcttggtgttcacttctccaaggttcgatcactgacgctggattcatgggaacctgaactgatcaagctcatgtgtgaacttggaaacaacaccatcaacaggatctacgaagcccgaatagaagatatgaacataaggaaaccaacagcagccagttcacggtgatattggccatagcaatgtgtttctatggggggctgcagagactagttacacaatgggaaccacctcattgtccttcttaaaggggtagttcaccctaacttttcctcttatccagttattggtggaatgttaggtccttatacccaggttccttgcatccccaggcaaggggcaccccacaacgatgtcatttgtttttttctaaattacaaccttgtgacatcacattatgataacactaaaattgatttcaacccttcagtgaccatttgtatcacctttgtcccccagcagtgagaaggagatctggattcgagccaaatatgttgaaaagaaattcatcactaagctcccacaaatctccatgcgaaccccccgtcacagccagcctgaacctccatcaagcagtcccaaagggagggggaccatgggacagaggccaaacagcggaccagagttaaagccaatgagcaggtcctttgcgcaaacagagattagccggccaatcagcagccctggtgctcaaacacaaaatattgaagaaacagaatcagaaaacggccgaccaatcaggttacggaaagcaacaaggccattgctgaagcctaaaccagggttggccacaccatctgctagagctgaaagtgtggatgtgaatgacgtacgtaacctccatcctggggcccttctgtaccgagcagtagaacatcgatgtctcccaacaatggctgatgctctagcgcatggagcagatgtgaactgggtgcggagcgaggagaggggatacaccccactaattcgggctgtgctgtcaaattctcttgttgcctgtgagttcctcctacaaaatggcgcgagtgtgaaccaaactgataaagatggacgaggccccctgcaccatgccacaattcaggggtacacagggctggcctgcctattcctgaaacgtggagcagacatcaacgctggagataattctggaaaagatgttctgtccattgctatagaaaatgccaacgctgacattgtcaccttactccggctggtaaagatgcgagaggctgacattgctctgggccaagcaggtgatgagacctacttggacattttccgagatttctctctcatggcttcggatgctccagagaaattatctcggagaagttgtgacctgcagctgagcaccttgtgaggccaatcttcagtagtaataagatccaccgttgctgcagataacaggacttctatacctctaggagatactctgtggagccaaaagactgtttcaaggccaaatacaggagaacctttaggaaaatcctttagacctacttaaagattattaaggaatgtgttgaagcacgtccctcaggaaggtgaaccatggttgcccaactgaaagcaaccccattgctgtggcttgtctgtgtgctcaggagaagacttgcttgaactgctcaatggttgtccattggtttcaaataaggccatgcctgtaccttttggtgattctgattagcccatgtattcacttaatttcccctctgtcctgatttgtgatggatcattggtaatgataaaggactgatgatttatgtaaaaaaaaaaaaaaaaaaaaaaaaaaaaaaaaaaaaaaa

SEQ ID NO: 286 - DNA, 2404 bp, Xenopus laevis
cccacgcgtccgaaggaatctaacaaactctgctcttcagatcactccctgcaccagccttgtctgccacctcacaaaaagtctttctcgtactaagaatccagactttgatcaaggagcatcatgtcctccacgggtggccgttatcgaggatcaataaaagatttcccagactttgattccaatcaggatgcagaaactctctacaaggcaatgaaaggatttggtagcgataaagaagccatcttggatcttattacatcccgcagcaaccaccagcgcatccagataactcaggcatacaaatccttgtatggaaaggatcttattgatgaccttaaatatgaactcacaggcaagtttgagaggctaattgttggactgatgcgcccccttgcttattttgatgccaaagaaatcaaggattccctggctggtgctggcactgatgagaaatgcctcattgagatcctggcatctcgaaccaaccaacagattcatgccctggtggcggcctacaaagatgcatatgacagagatctggagacagatgtcatccaagagacgagtggtcattttaataaaatgttggttgtcctgctgcagggcacacgtgaagaagatgatgtggtgagcgaggacctggtagagcaagacgctcaggagttatttgaagctggagaacagaaatggggaacagatgaggctcagttcatctatatcttgggaagcagaagcaagcaacatcttcatctagtattcgataagtaccaggagatatcaggaaaaactatagaggaaagcataaaagaggaactttcgggagattttcaagaccttatgctggctgtggtcaaatgcattagaagcaacaggttatattttgcgaccagactgttcaaagcaatggagggaatgggtactgctgacaacactcttatccggatcatggtttcacggagcgagattgacatgttggacattagggagtctttccggaccaagtatcagaagtctctttactccatgatccagaatgatacatcgggtgaatataagaaggcccttctgaagctctgcggaggagatgatgacgcccctggggaattttttccagaagcagctcaggcggcctttcagaactgggagcttagcgctgccactgcgagacgtttggagctaaaaggaacagtgcagcctgctgagaacttccatgcagacaatgatggcaaagccctgaggaaggcaatgaaaggatttggtaccgatgaggataccatcattgatatcattactaaacgcagtaatgatcagcgccaagagatcgtcaaggcattcaaatcccactatggccgggatctaatggcagacctgaagtcggagctgtctagcaccttagccaaagtgatccttggtctcatgatgacaccggcccagtttgatgccaagcagctgaacaaggctatagcgggggctggcacagatgaaaaagtcttaattgaaatatttgccactagaactaacgaggagatccaggccatcaatgcagcttatcaagaagcctataacaattctttggaagactccattagctcagacacatctggacatctcaagaggatactgacatctttggctctgggtagccgggatgaggctggtgaggacctggataaagcagtggaggatgcaaaggttctcgcttcagttctagagatctcagactctgggtctgatgattctagctcactcgagacaaggttcatgaccatcctgtgcactcggagctacccacatttgcgaagggttttccaggaatttatcaagcagacaaatcatgatgtggaacatatcattaagaaagaaatgtctggaaatgtaaaggatgcatttgtggccattgtacgcagtgtgaagaacaaaccggccttcttcgcagagagactctacaaaggaatgaagggagcaggaacagatgagagaaccctcacaaggattctggtatccaggagtgaaactgacctactgaatatccggcaggagtttaagactctatatgagaaatcactacaccactgtattgagagtgaaacttctggagattatcaaaaagccctgctggcactttgtggtggtgacgactaaaccaaagaaatcctctgcatcgaatgcctgtcttgggttcactggcacccatgcaccaaatgtctttgtgttagctagtagattctgaaactggcgagtaactgaagaatgttctcttcaacatgactaggagagcatactaatgaaattcacagaatgggacatgggtgggagggagaagagaatttcccagatatcctaaacacgtgtatgtaaccaacgagaagtaaaggttttaaagtacaaaaaaaaaaaaaaa

SEQ ID NO: 287 - DNA, 5504 bp, Xenopus laevis
aggcagttcatatttattctttttacccgtgtttggtggatattacataagggcttcgtggtagtatcgaagccataggagtctaaacgctttatagggatttagaatttgatcggtttcctgtctcttcggccattacaatgagcgtggaggcgtacgggcccagctcgcaaaccctcaccttcttggatacagaggaggccgagttgctcggggccgacactcagggctcagagttcgagtttacagacttcacgttgccgagccagacacaaggacaaagccagagccaactggacggtcaggtaaacggtcctgatggcatgcttcagaatggcacagtggatgatggtgttggcaaaactagccagttgttgggtgaactgaactttgaggaagacgaggaagacacctattataccaaggatcttccagtgcatgcttgcagctattgtggtatccatgatccagcctgtgttgtgtactgcaacaccagtaagaagtggttttgcaatggtcgaggaaacacttctggcagccatatcgtaaaccatttggtccgggctaaatgtaaggaggtaacgctccacaaagatggacctttgggagaaaccgttctggagtgttacaactgtgggtgtcgtaatgtttttcttcttggattcattcctgctaaagctgactctgtggttgtactactttgtagacaaccttgtgccagtcaaagtagcctgaaggatatcaattgggatagctcccagtggcaaccgctcattcaagatcggtgcttcctttcttggctggtaaagataccttctgagcaggagcaactgagagcccgtcaaattacagcccaacaaatcaacaaactggaggaactgtggaaggaaaacccatcagctactctagaagacttagaaaagcctggtgtcgatgaagaaccacagcatgtcttgctgagatatgaagatgcctatcagtaccaaaatatctttgggccacttgtcaaacttgaagctgattatgacaagaagcttaaggaatctcagacccaagataacattacagtgaggtgggacctagggctcaacaagaaaagaattgcatacttcactttgcccaagactgattcagatatgcgcctaatgcaaggtgatgagatttgtttgagatacaaaggagatttggcacctctttggaagggcattggtcacgttattaaagttcctgataattatggtgatgaaattgccattgagttgagaagtagtgttggtgcaccagttgaagtcactcacaatttccaagttgactttgtttggaaatcaacctcatttgacagaatgcagagtgctttgaagacctttgcagtggatgaaacctccgtttcaggttacatctaccataagcttttgggacatgaagttgaagatgtgattataaaatgccagcttccaaagagatttacagcacaagggcttcctgatcttaaccactcacaggtttatgcggttaagaccgtattgcagcgcccacttagtcttattcagggcccacctggaactggtaaaactgtaacatcagccaccattgtttatcatctggcaaggcaaggaaatggacctgtcctggtttgtgcaccaagcaacattgctgtagaccaactcactgaaaaaatccaccaaacaggactcaaagttgttcgtctctgtgcgaagagccgtgaagctattgactcacctgtttctttcttggctttgcacaaccaaattcgcaatatggaaagtatgcctgagctccagaagttgcaacagttgaaagacgagactggagagttgtcctctgctgatgaaaagcgatatcgtgccttaaaaagaactgctgagagagagctacttatgaatgcagatgtgatttgctgtacttgtgtgggtgcaggtgaccctagacttgcaaagatgcaatttcgctctatcttgattgatgaaagcactcaagccactgaaccagagtgtatggtaccagttgttttgggagccaaacagcttattcttgtgggtgatcactgccagcttggcccagttgtaatgtgcaagaaagcggcaaaagcaggactgtctcagtctctgtttgagagacttgtagttctgggcatccgaccaattcgcttgcaggtgcagtaccggatgcatcctgctctaagtgcatttccatcaaacatattctatgaaggatctcttcagaatggtgttactgcagcggaccgtgttaaaaaaggatttgactttcagtggcctcagccagataaaccaatgttcttttatgtgacccaaggacaggaagaaattgccagctctggtacctcttacttaaacagaaccgaagctgctaatgtggagaagatcaccacgaagcttcttaaggcaggagctaaaccagatcaaattgggataatcacaccatatgaaggccagcgctcttacctggttcaatatatgcagttcagtggttccttgcatacaaaactctaccaggaggttgaaattgcaagtgtggatgcttttcaggggcgtgagaaagactttattattctttcttgtgtacgagccaatgagcatcaggggattggattcttaaatgatccccgtcgtcttaatgtggctttaaccagagcaaggtatggggtaattattgttggaaaccccaaagctctttcaaagcagccgttgtggaatcatctcctgaattattacaaggaacagaaagttcttgtagagggtcctctaaataatctaagggagagtctcatgcagttcagcaaacctcgcaaacttgtcaacaccattaatccaggtgcccgtttcatgacaactgcaatgtatgatgctcgtgaagccatcatccctgggtctgtttatgatcgaagcagtcaaggacgtccctcaaacatgtattttcagacccatgatcagattggcatgattggctctggacctagtcatgttactgctatgaacattccgataccattcaatctagttatgcctccaatgccacctcctggctattttggacaggcaaatggaccagctccaggacgtggtatgcctaaaggaaagtcaacacgtggtggacgtccgaaacagcgaggcattgggcttcagggcatgagtcaaggaaatatgccaaacagtcaggccagtcaagatgttgtgtcccaaccattctctcaaggccctctaacccagggttatatttccatgagccagccatcccagatgagccagccaggactctcccagccagagttatcacaggatagctatcttggtgatgaatttaaatctcagatcgatgttgcattatcacaagactctacataccagggagaacgtgcgtatcaacatggtggtgtgactgggctatcccagtactagcatgttgaagaagagctaatcctgcgtggaacttagttcatccacattttattctgagtaataaaaaaataaacggatacctgttttccactgctaaaactgaagcaccactgtgagagcaacaggagagagaggaacgagagagggacaaaaaacaaaaaataacgagaacgagaaagaaagcgagaccactgcaagcacactgagacgaggagaacggcaggagaagaggctgtacatcagaggagcaagtgcacctcaaagggatgggtagtaaactgggagaagcttaacatcaagttgccctgtttaacgagcggctgactaagcatttgtaccctcttgggcaggtacaagagagaagcatatttgctctttttctcaatcaagtgagttctttggcaccattttatcaaagctggaggaaaacaatttcttatgtcagagttgttttatcctatagactccagtagatgagtcgtctttttgttttaatgcaaaccgcatcccttctagattgttaaacataaagcataagattactgacacatggagaggccaactttgagatgcaggtttgattttcaaactgcctttgattgtgaacaggatggtcaactttacacccttctactgaaaggttctgtcactacccgatggtttacagaagttttctagttatatggaagtgctggattttttttcttagtttgtatccgattgcggtggacctgaaagtacttcaaagcattgtggtttgtcagttaggaatactgccacctgcagggatgttcagtgttaagcagcagtaaataacctaatgactagcctctctttcctaaagcagtgtagcagagcaatggagtatgcaaactcccttaaggagagggtttttttcagtgtttttctgtatgctttgattggctactgtctggactctatgccacaaaacaaatctttgtttagacaaattcatgcttgaaaaagggaatgggattcatctgcccttcggcccccacttaacaggaaagcgacaaaagttagcctgcgatgagctcccctaccagcaatggatgtagtagtggaaactggggattatattggtttgaaagtcaagtttttctcaatcacttttgcaactggttgaaaaaatcagaatgcaggcaaagtggaaggtggcccacagttagtgtatggttggagttatattttattcttttcgtgaggtcctaagtaaatgtggccttgcaccatcgggcaagaaatgtactagctatgccattcagttccagctcccatgttctgttccaaagggactaagggaaatcgacccattttataatttctacctagaacagaaggaattcttacatacctcttgtcctaaattaaatgttaagttccatataattattttaattctcttgaagcacccacaacatgagttaacttttcttaaaatttcaatcacacccaatgtttatatttgagcagaatgttgcagtcaatatacttatcttgttatattaactgtgcttgagtgtttcccttttgtaaggcttatttcaaatgccagtggccttcctatgaaggcagggtttgcagaaataccaaaactctttatatagacctcactagagctgcactgcttcgtcttgtattggctccattctgtgccatgaatacatgtaactctggccaccttccttcctgagagatggatttttttatttattatcattgccgaagggctcttttaaaacattttgttttcccgttattcccccctccagttagatttagtagatgcatatttagcttctgtatcctttgtgcaaatgctgattatgagtaatataacattctccaatctatttctctgtctggaatgcttctgcaatttttttttatttgtttagcagttgattgtatgttttaataccccataaacatttgtgatttgtcttttccccctcaatctcacccccaccatcattttggtttgtctgaacttgttttaaacctttgtcatgaataaaatgattaagaaacaaaaaaaaaaaaaaa

SEQ ID NO: 288 - DNA, 1820 bp, Xenopus laevis
ccacgcgtccgtaagagaacatcttgtaaggaagagagctcaccggctcagggatcgcgatcatgtctcaccactggcgcaatgtcaccgaggaacacaggcctcctgcaccatctcgatggtcacaaggaagaaagagatgctcagacgggaaactgagacgttacgatgatacagattccacggtatttgacagtaagccttccgaggaacctgacaagaggcctgacagctttacaacccctgaaagtcacaaaccagtgccaagatgcaaagactggggcagtgcagtggaagaagaggagcagctgagggaaaaagttgaccaagacatagagcgatacaggaggaaacttctgattcatgagtttggtggaagagagagaagatcatcgtctggaagttctgattcaaaggattcatctacacatggagagatggaaactgacccagctgttatagcaagaagacaaaagcagataaattatggaaaaaacactattgcatatgacagatacattaaggcagtgccaagacatcttcgagagcctaatgtgcatcctagaactcccagtaagttcaaaaaatacagtcgcagatcttgggaccagcaaattaggctgtggagaattgctctacatcagtgggaccctcctgcagaagaaggcagtgacttgcagccttttatggaagaagatatgatctgcacagaaacaagctctcaagataacctattcacaggaacgcctactaaggtccggaaagttgaagcagaggatgcctttgatctggaaccctgcgttattgaggaggaattacttagttaacacacactgcattaccagaaggaagggcttgggatttgtattttacacatacagtagaagcaaatttcactcccaggtccacttttgtgcagctacatggagtaagatttcacgaagtaaccggactgccttaactaacgcatagttttttggtgctggtaaaaggctgctacgtggtgttcttcaaagcacttgatattataggagcagctgaactgtatctgcagtatggtaattgcttcacaggtttaataaaatgtaaataaaagggtggttcaccttcatgttagcatttagtatattacagaatagccaattctaagcaacttttcagttggtctttattattttttacagttttgtaattatttgctttctactgactccaacttttaaatgggggtcgttgacccccatctaaaaaacaaatgttctgtaaggctacaaatttattgttgctgctactttttattactcttctattcatgtatctcctattcatattgcaaaaaagaagtttaactttatattaatgcttataaaaaagaaatttattatattctattaaaatacatagcctttaccctcatggtgcctaacgcgtttcatgcttacccagcacttcataatcataggcaatctgggtaaagctgaaacgtgttgggctccatcaggggaaatgctatttattttaatgattttttttttttatcagcctgaatatagttaaaattcttttttatgcaatgtgttacctcagtttggtcacgagagctgctgtattctatagaccttttactccatatattacttcataatacggattctgtaatccatttctttgagtatttaaaaaaactctcctattcataaaacagtcacttattcaaatcaatgcatggttgctagggtaatttgaaccctagcaaccaggtcgctgaaattgcaaagctgcctaataaaaagcaaaataactataaaaaaaaaaaaaaa

SEQ ID NO: 289 - DNA, 1325 bp, Xenopus laevis
gtgattctactccccacgtttgcgtgtgataatcccattgcggtagctcgggtttcaagaatgaacgggactccaccccctccgccgctggacagagaggaacacgtccttcgcctcggcgagagtttcgaaaagaggccgcgttcttcttttcacacagtgcgctatgatttcaagccagcatccattgacacttcttgcgagggggaacttcaagttggcaaaggagatgaagtaacaattaccttgccgcacattcctggttcaacacctcccatgacggtatttaaaggaaacaaacggccttaccaaaaggactgtgtgctgatcattaaccatgacacaggggagtatgtgctggaaaaactgagcagcagcattcaagtaaagaaaaccagagctgagggcagcagtaagatccaagcacgtatagaacagcagtcagcccgcgcttctcaacccacacctcagttcaaagcaccttccaaagtagctgctgggactaaaacatctccattaaaagaccatccttctcctgaaccacagcttgatgacattaaaagagaactgagggcagaggttgaaattatagagcaaatgagcagcaccagcggcagcagttctgaatccgggagctcctctgggagtgacgatgacagcactagcagtggtggagaagaagaaacacaggaatccccatctcaacagctgccacctcaacagctgccacctcaacaatataacagcaggatacctgtttctaatggcagcagtaggtcacaaggaacaaatcagctaatgaacacactcagtaagtattgcttgcttggttcagtgcatgttgtactgtatattgctgtgtttccaggaatacattctcagaataacctttcaagcatacagatgtatgtttctctcataaaggttctgtggtgtaattgaatcattgaccatggacattttactcattttaagcagtcccaaatgtatgcttcctttctagtggagaaagtgctgagaagctacacataaagtgctttttgagagggttactggtatatataacactggacaagtaatcaaggcaaatgtttaatcgttaattatagctactaggcatccacactagaagtatgacacataaaatagatgatcaattataataacttagctatacaagaaaagaagcaagacatataaatgtcagagttaaagctttctccaacataaaaatgctttgccccaccaactaggtgatacctaggaagaagcagacactgatagatatgttaccattactgttaagcatcaaaaaaaaaaaaaaa

SEQ ID NO: 290 - DNA, 733 bp, Xenopus laevis
cgctggtttccggtgtcctctctgctcttccttgctgatagtgactgctcgaggaagaatgctgtcctcacgggtgctcagcttggttgggaagagagccttgtccacatcagtatgtctgcagggacatgctggtgttgccacaccagacacttacagccttcctatctacgttgatcgtcgtgacgtgcctctgcctgatattgctttcgtagatactctttctgttgaacaaaaagctctgaaggataaggaaaagggagcgtgggcatcactgagctccaaagagaagctggatctataccgcataaaattccacgagagctatactgaaatgaaccagggatcaagtgaatggaagaccattcttggtggcactctcttcttcattggctttactgcattcgtagtcctttggcagaggaagtatgtttatggagatgttcctcataccttttctgaggactgggtggctatgcagaccaaaagaatgttggatatgagaatcaacccagtgcaggggttctcttctcagtgggactatgacaagaaagaatggaagaaataatcctgcttttctcaaaatcttcatattagcaagcaaaaacatgtttgtctaaaatctttcaatggtccaatccagacacaatacctcattacatatttactggaatatattcatctttattgtgttaccaataaagtgctggtttacttgaaaaaaaaaaaaaaa

SEQ ID NO: 291 - DNA, 1923 bp, Xenopus laevis
gagggatcagcagcagcagcctggctttcatgtccacctacaaggggagcaaagcagcaacagcgaccagttccatctacaaaggggggaaggggctggatttgagggatactgcattggctgcccctgcccccctcgctcttgcagtctctgcctttacgcgtgtggctggcgagccatgaattctgcagagcaaaccgtaacatggcttataactctcggggtgctggagtcgcccaagaaaaccatctccgatccggagggcttcctgcaaacgtccctgaaggacggggtggtcctgtgccggctgctggagaggcttttgcccggttccatagacaaggtgtaccccgagccgcgcactgacaccgagtgcctgggaaacatcagggagttcctgcgaggctgcagcgccttcaacttggaaacttttgatgccaatgacctctatcaggggcagaacttcaacaaggtgctaaactccctggtgcttctcaacaaagttacagcagatattggcttgggaagtgactctgtgtgttcccgttcatcctctcatcggataaagtccttcgattcccttgggtcacagtcagtgcttagccgctcttcaaaattattgcagagtcaatataggagcttggacatgacagaaaacagcaaccaccatatggtggtacgggccaagtttaatttccagcagacgaatgaagatgagctgtcttttaacaaaggggatatcattcatgtcacacgccaagaagatggtggctggtgggaaggcactcacagtggcaaaacaggatggttcccaagcaactatgtccgagaagtaaagtcatctgaaaagccagtgtctccaaagtccactacactgaagagcccacctaaagggtttgacacatctgcaatcaacaaaagttactacaacgtggtgctacaaaacatactggaaacagaaagtgaatactctaaagaactccaggacatgctttccaactacctgcgacatttgcaaactagtgaaaaattaagccctacaaatatctcttacttaatggggaacctggaagagatatgtgcttttcagcagatgctggtacaatcattagaagaatgcaccaagttaccggaggggcaacagagggttgggggatgctttgtgaatctgatgcctcaaataaagagtctgtaccttgcctattgtgccaatcatccttcagcagtaaatgtcctcacacaacacagtgaggaacttggcgagttcatggaaatgaaaggtgccaacagcccagggattcttgtactgacaacaggtctgagtaagccatttatgcgtctggacaaatacccaacactgctgaaagagttagaacgacatatggaggactatcacccagatcgaccagatatccagaaatcaatgaccgcgttcaagaacctttctgtaagataagatcatttatattataaactgcaaagagaggcaatctaaaagtcagattctgaatgaatgccatgtatttagttcagctcctctcaacaaatgagttcagattttgcacattattttagaatgttaccaaaacattgagcatttttggatttttggttttgttttaattttgtgtctgtgaagcacacacttgaaatgttttaatttttgtctaccacaacggtgaagtttaagtacgctctctgtcacaaatactgtagatatcatatattttttttatttaaattgttagttttttttcttgttaaaacacaatacagacaagctgcctgagagttatagattgcagatagttgatggctgctgctatcagactgcgagattaggacattacaggattgtaggattgatgaaattccaaatttataaataaatatacattatcaatattgaaaaaaaaaaaaaaa

SEQ ID NO: 292 - DNA, 2886 bp, Xenopus laevis
caggcagtacagagtacaatgtggaagagttcggagagagtgctgctgggtgtatgtcgggagttgtgatctcctaacattaggcggaatagaggggtcatattccaatctgaggttgtgagaggctgacataaaactagtttaatgcatgtctgaggaggagacgtaccatttctcttgttttaagcccattgcaaactttgtgggaagtggaagggaaggtcgtaagcaagtcatggctctgggcaggggagtctgctgggtgcagcctgtgactggaatacttgccctgctcgggatctcagtgaccatcccacccttactagtggcagagaccctgggggatggatgtggacatgtaatgctgtatgaagagagtgggactctagcatccaagaattaccctggaacataccccaaccaaacactttgtgaaataacccttaaagttaaaactggcaaaaacctctatattatgctggcagatgttgacatagaatcaagggactgtgaatctgcgtatctgaaaatctttaaaggaacctcatctgaggagatagctagttactgtggggatcaaagcacaatacctaaggaaatctttttgaacaccaataaagccaccatccgttttgagagtggaatacatgtgtctggacgtggatttttgctcaactacgcaagcagtgatcatccagatctgattacatgcctggcaagatctaatcattataaagacaaagactacagcaggtactgtccagctggttgcaaagatgtagctggggacatctcgggagatgtgctggaaggatacagggatacctccttgctctgcaaagctgcaattcacgctggaattattgcagatgaacttggaggacagattcaggtgaaccagcacaaaggaattagtcgatatagaggctttttagccaacgggatcttgtcaaaagatgggtctctttcagaccgtcggattgtgtttagcagtcctgattgcagcctatccttgacaccggggtttggaaaagataggttttcagccacctcatcttatcattggaacactgaaacaggggaaattatgtcttggttacctgaaagagcacagcttaacacaccaggcatatcatgggcttctgataaccaatccagtcgggagtggttagaaattgacctaggagataaaagaagaattactggtattgtgaccacaggatccacattaccaaactttaactattatgtgaaatcttatatcatcagctttagaagggatggatctaaatggaagctttataagggagctgtcagcaatgaggaaaagagattggatggtaacttaaattatctggagagagcacgcaacaattttattcctcctatagtggctcggtatctgagaatcacaccccaaacctggaacgaaagaattgctttgaaggtggagcttgtaggatgccatttagcaccgacacataattcatccactcatcctatgtggaagaagacaagtgaccttagcaagaaaccaccagtgactgaagaaaaggccatcactgagcttgttcctgctgaagaatcaaacctgggatggaaaatctttgctattattgtccctattgcactagcagcatgcgtgcttattgctggagtctgtttttgtgcaacaagaagcagaaagttaaagactgaagcctacaagtcccctgaggaaaagaatgggggttgctggaaacctctcgaccaaccgattgtacgacagcagtccacagaatttatcattagttacaataatgaccaggacccaccacagaagtttgatctagtgaaatgcgacatggaagactatcagcagcctgccatgatcggtactggcttggtcacacgaaaaggttccacattcaaaccaatggacacagacaccaacgaaacctcaggaactcaggaaattgaaaaccactatgattgcccacataggaacagacatcagtatccccttcccctcaccatttccaagccagaatatgccacccccattatagaacgtcacttgattaggggaaacacttttacttctgagtctggatataatgtaccggtaatatcgttagaccgccagaactccttctctgctgttagtttttcaatctcgactagtccagagaacagcggtagggactaccagacagctcactgcatcaacacagaagaatgtgattatgatcggcccaaggtgtatagcggatggactgcaatagggaatgatgagtaccaaaagccacagatctgctccatggtggcagatggttactcttctccacgggactgtcttaagccaataaaccagactgcaataacttcgctcttataactgtaacaaagggaaaaacaccaaggcacattcctaacctatgttactgcacagctgctggaagatgttgtttacactgatgactatttttttatatattttatgttaatgcctggaaatcattcaaggggaatgtgattttatctcaagggcacaggttaccttatattatgtgcaatgtgtacagaaaatatttaaaaagaacatgtattgttgtacagatataacttttttttgttagtgttttgttctttattgttacttgagaaataatggtgcacacactgcttggaatctaaaaaatagcttaatgttttgtatgccaattgtgtagaacattaagctcattaacactgtgaatgtgtataaagcttggttacctgtaaaacaggatcatatggaaatatatttgtcataatatatgctggttggcagggtttcaacaatgctatgtttattagaaacaattcataataaatgtgttgttctctcataaaaaaaaaaaaaaa

SEQ ID NO: 293 - DNA, 5690 bp, Xenopus laevis
gcagcaggcagcgaggtagtgggccgggcgctgtgtgtgaagtggcacaggcaggcggttgtgcaggatctgtcatgacgcgttctgcttagaggcagggtcagaggaaaccgagcagacaggactgtgcgccgctgtgttggtcgggagactcgccatgtgtctgcgggaggctctatatccccctccctgctgctgtcatacgcaccttgtttaaaagtcacttctgtgcctttattaggaattaaatggaacctcctatttcttcctcaagtgtctgagtctggatttgaggcttccagtcccaccagtgcgttgctctcactgaccccacaagggtcgcttcctgtgcatcttacagggggtgtagtataatcaagggggcacttgcatttctttttaaaagccattaagtagtcatggagcgaagaagttctgcagatatgtgccatcctctgttggaagtcaatagcatgccagccgacaaggcgcccaaggaggagaaacggtttcgcctgtggtacatcggctggtcctctctggaccgtagaacaaccttgccaatgcttccttggcttgtggctgagatccgcagaagggcagaaaggcaagatcctcctggatgtgcggcaccttgcagagaagtcaatctcatgctggttactccacacctccgctgtgtgccagccatgaatggtgccaatgccaacagtgccgtcttcatctttgagcacaaagcacagcatatatcccgcttcatccacaatagccaagatccttcttattttgcctacctgataaagactcagcccgacaacccggaatccgaaatggcttgccatgttttcaaggccggtagcccaagacaggtttctgatatcatcagcagcatacgtcaagtctccaaagtcgccctgaaagaagattctaagccctgcagagacagtgaagatgccttttataattcacaaaagtttgaagtgttatactgtgggaaggtagtaattgcaaataaaaaggcgccatctacccttgtggatgactgtattgagaaattcagccaacatgaacgccagcgtttacagtcattgactgaacagcagagctccgaatccagcattgatttttctttagcggaaattgatgtcccaggttccccttcagatatttttctagagcaagactctgagaataacatcttcccttcttctgggcatcattcagggatttttacagttggcagtcagagcaatctgcttggttcaagagtaacttttcctgagaggattttagaagactctggctttgaggaccagcaagagttcagaactcggtgcagtagtgttacaattcaaaaaagatcccaggataataaaatacagccaagaagaaggcatgcaagtgccccaagccatgtccaaccctcagattctgagaagaacagaacaatgctttttcaggttggacgttttgaaatcaatctcataagtcctgatactaaaactgtggagcttgagaagaatttcaaagatatatcatcatgttctcagggtattaaacacattgatcattttggtttggtctgccgtgaaagtgtggagcctgggataaatcagtatatttgttatgtttttcagtgtgcatctgaagcattggtggaggaagtcatgcttactttgaagcaggcattcagcactgcggcagacttacagagtgcaaagacccagatcaagctatgtgaagcgtgccctatgcatgccttgcacaaactctgtgaacgtatagaaggcctttacccaccaagggcaaagattgtaatacaaaaacaactgtctttgctgactgataacgaacaagcagatatctttgaacgtgttcagaaaatgaaggccaccagtgaccaagaagaaaatgaacttgtgattttgcatctcaggcagttatgtgagacaaagcaaaaaacccatgttcatataggagaagtgcaaccgaatctgtcatgcaacacaattccagaaaacacagctccgagtggcagatttaaactggacattctgaagaacaaggccaagaaatccttgaccagctctttggagaatatcttttcaaggggaacaaataaaatgagaggacgactgggcagtatggacagttttgaacgttgtaacagttttacatctgacaaggacgtatcaccaggagactcgcctcctgccacaccaccatcttcccctgtgtcctcctccttcccgccgtttccagaagaagatcctgactcacctaaggttcgtagacgagctcacactttcagccaccccacatccagtggcaagcggaggataacatttcctgacagtaaatcaccaagtgccaggttccccctccagaggcagaattccttagcaaatgacgtgggacaaagcagtgaatgtgaaggacgaaggagaaccttctctacatgcagcaatgactcattaaatgctagtggggcctgtctcacaccacgtcgaatatcgtggcggcagaggattttcctcagggtagcatctccaatgaccaactccccatcagaaatgcagcataaaggccagctagatgtgaacgatttgctgccgttatctcctctgccacctgcaatggaagaagaccctctagctgaacttcttcagacagaagactcggtattacaagcagacggaaagcgaagtgctgaagactttcagaacctgtggaagaaagcaatacaccagcagatattgttattacggatggaaaaggagaatctaaagcttgaagcaagcagagatgaactgcaatcccggaaagtgaaactggattatgaagaagttggatcatgccaaaaagaagtctcaaatctttgggataagaagttaaactgcagaacaaagattcgatttgacatggaagagatttttgcttctcttaaagaaggtgtaccaaaaggcaagcgtggcgagatatggcagttcctttccgtgcagtatcgactcaggcatcggctcccaaataaacagcaaccgtctgatgtgtcgtataatgatcttctcaaacagcttacagctcagcagcatgctattcttgtggatctgggaaggaccttccccacccatccctacttctctgcccagctgggagcgggacagttatccctgtataatcttctcaaagcctactcattattagacaaagaagttggttactgccagggaataagctttgtggctggagtacttctcctgcacatgagtgagcagcaagcttttgaaatgctgaaattcctaatgtatgatcttggcttccgcaagcaataccgtccagatatgatgtcactacagattcagatgtaccagctttcccggcttctccatgactaccaccgagatctttataaccacctggaggagaatgaaatcaccccaagcctctatgcagccccttggtttctcacacttttcgcctcacaatttcctttaggttttgttgccagagtttttgatatcatttttttacaaggaactgaagtcatcttcaaagtggctctttgcctgctcagtaataatgaagcactgataatggcccgggacagctttgaaagtattgtggatttattgaagagcaccataccagaaatgacaaatgaaaccatggaaaaaattatgacacaggcatttgagatggacatttcaaaacaactccatgcttatgaagttgagtaccatgtcattaatgatgagatgctcgaggcgtccattccttgtgatgataatgaatccttccgcaagttggaaaaatctaataatcaacttaagagacagaacatggatttgctggaaaaacttcaggtagcacatacgaagattcagagcttggaatccaatgtggaaaatattttgtccagagaaaataagatgagaaatctagtcctgtcgatggaagaagaaagaacagtgtatcaaaatgtgtttgagctcatgaaaaaatatgtgccgaccaacgttctgacagactgtgaagttttgttgaaaaatgccacgtgtagtcctaacaacaggaccaagccaggaaacaagcaataagctgaggctgtttgggcatgcatctaatatgtgtcttaccaactacaaggtgcaagataaaatgttttcagaaggaagcaaatgcacaatgagcaaaatggtgccttgtgctcttataagcggaggagcttgggctgcagcattaaagtaagactgaagttaaacactattgtactgatctgcagtaaggaggaaaatggccgcttcttaaatatgcaaaatccatggtttcacaaagatgttattgcacaccaggccagaagcatgaatgagatttggtttgtatccaggatgtgtagataggaaatcactggaatgcacccacaagaatcaatttgtgaagaacatctattttttttttttcactctgcaatgtcattaattatctttgtagaaaaaaacaaaatatatacatgtattcaaaaatacttgaaaaaaaatgaatgtaattttccaaagatcagcatgtctcacattgctggaatgacatttgtataaattgttcacgtgctttgtcattgtatctactgtcactctgctaactttcgtttttaacatgatcactacacagggctcatttactaactgaggtcttaagttgcacaagcacagtaactgcaaccaatcagcatttagctttgcagcgaactgcaagttggaatgaaagcaaagatgttattggtgcaatttagcacctatgtttttcaatcagcctcattattcctacgttcaaatgggtaggaagaataatatatatctatggcttataattctatgccggatttattttttctgtctacccataatgcattgttcttttggggcattatgctaagaatctccaattaataaaacatggaggaacagtgtaaggggacactgggaatcaggacagtagggtcccataataatggtgtttcccattatcagcaggagaacatagcattttgattagtgatcacaaagatattactgcaaaaaaaataggggaaacaaagaaaaatggagcacaaggtttttgcataatttatacacggacaacaatgtgcaaaaatacttgtaaacatttgctccatttttttcacattgactgttttggaatttgactacattcccccatgtgccatagcccttaatgttggcttgatgtcccttgaatctttttccccacaaacattgtcaacaggggaagtgacattctgccaacaatgcagcacccacatttctggcttacactacacactaaagtgcattgcttggcagctttcctgaagtgcaactaaacccacctggcagaaaaagggtttatgtaaagtaataaaagtaataactgttgctgtttgccccaagggaacacatttatcctcacaatactttaaatttcattgcaaaacccaaaccaatgtccccaagtgtttgtagactgaaatgaatactttgaagaattgtgattttattaaagggaaaacgccagaaatgtcagttaatatacagtaattgtcattctggccaatcattttcataaacaatataatcatgaaaaaaaaaaaaaaaaaaaaaaaaaaaaaaaaaaaaaaaaaaaaaaaaaaaaaa

SEQ ID NO: 294 - DNA, 3417 bp, Xenopus laevis
aggcctgtgggggaaggtcttcctcttttctgtcaaacaggtccagatccagaacacatcggcaacatttcatccatcacaatcttccaccatggaactgagtgaaggcaatttacagggactaacggagtatttgaagaaaacccttgatccagacccagctgtaagacgcccagccgaaaagtatctggaatcggttgaaggaaatcagaattatcctctcctgcttttaacactggttgaacgctctcaagataatgtcatcaaagtttgctctgccgtcactttcaaaaattacatcaaaaggaactggagaattgttgaagatgagtctaacaaaatctgcgaagctgaccggatagctgttaaatcaagtatcataaacctgatgctgaggagcccagagcaaatacaaaagcagttaagtgacgccatcagcatcatcggccgggaagattttccccagaagtggccgaatctcttgacagaaatggtgaacaggttccagagtggagactttcatgttataaatggggtcctacacacagctcactcccttttcaaaagataccggcatgaatttaaatcgagtgaattgtggacagagattaagcttgtacttgatacttttgctgggccactgactgatctttttaaggcaaccattgagctgtgtaatactcatgcgaatgatgtcggtgctttaaaggttcttttctcctccttaaacctgatcgccaagctttttcacagtctaaactttcaggaccttcctgaattttttgaggataacatggagacgtggatgaccaattttcacaacctgttaactttggataacaaactattgcaaactgatgatgaagaggaagcaggcttgctggaactgttaaagtcccaaatctgcgacaacgcggctttgtacgctcagaaatacgatgaagaattccagccctacttgccgcgctttgtcacagccatctggaacctgctggtgaccacagggcaagaagttaaatatgatttgttggtaagcaatgccatccagttcctggcatctgtatgcgagaggcctcactataaaaacctctttgaggaccccagcactttaacgagtatctgcgaaaaggtcattgttcccaatatggaattcagagctgccgacgaagaagcttttgaggacaattctgaagaatacataagaagagacttggagggatcagatatagatacaaggcgcagagcagcttgtgatctggtgcgaggtttgtgcaagtttttcgaaggcccagtgaccaacatcttctcgggttacgtgaactcaatgctccaggaatacgcaaagaacccgtctgtgaactggaagcacaaagatgctgccatataccttgttacgtctttggcatctaaagcacaaacacaaaagcatggaattactcaagccaacgaactggttaacctaacagaattcttcgtcaatcacattcttccagatttaaagtctgcaaacatcaatcaatatccagttcttaaagcagatggcattaaatatattatgtttttcagaagccaaattcccagagaacagcttctggtgaccattcctctcctaatagcctatctgcaggcagaaagcatagtagtacatacttatgcagcccatgccctggagaggttcttcaccatgaaaggagccgctaccaccaccctcattgtagcagctgatatgatgccatacgtggagctccttttagctaacctgtttaaagcactttccttacctggctcaactgagaatgaatacataatgaaagcaatcatgagaagcttttcattgctccaggaagccatcatcccatatataccgtctgtaatcagccaactaacacagaagctgcttgcagtgagcaagaatccaagcaaacctcatttcaatcactacatgtttgaggccatctgtttatccatccgaatcacctgcagagcaaaccctgctgctgttgcgagcttcgaggatgccctcttcctggtcttcaccgagatcctgcagagcgatgttcaagaatttatcccctatgtctttcaagtcatgtccttgctcctggaaattcacaccactgatatcccaccatcctacatggccctgtttccgcaccttcttcagccagttctgtgggagagaacaggtaacatccctcctcttgtcagacttctgcaggcttatctcgagagaggagccacgaccattgctgcaagtgcctctgataaaatccctggtctgcttggtgtcttccaaaaactgattgcctctaaggccaacgatcatcaaggcttttatctgcttaacagtattattgagcatttgcccgcagaatgtattgaacagtacaagaggcaaatcttcatcgttcttttccaaaggcttcaaagttccaaaacaacaaagtttgttaaaagtttcctagtctttctaaatttgttttgcatcaaatttggagccattgcgctgcaggaaatgtttgacagtatccaaccaaaaatgttcggaatggtcgtggagaagatcattatccctgagatacagaaagtttctggacctatcgaaaagaaaatctgcgccgttggactgacgaaggttctcacagaatgcccagtgatgatggacaccgagtatacaaagctttggactccattgctccaggctctcattggcttgttcgagcttcctgaagacgacaccatcccagacgatgaacatttcattgatattgaagatactccgggctaccaggcggccttctctcaattggcatttgctggtaaaaaggaacacgaccccattggggaaatggtgaacaatcccaagattctgctggctcagtctctccacaaattatccactgcttgtccgggcagggtcccgtccatgatcagcacaagtttgaatgcagaagccctgcagtttcttcaaggataccttcaagctggcagcgtctcgttggtgtgaatcactcaccgaaacaagaaatgtctccggcaatttgtgaggttgttaatactgtctctgcctggtcacaatcctggactgcagaatccgatctggtaatgaatctccctctgcagccaataaggcctcggcgtattgatacaagcttggctactaatctcattgtgtgatgagtacgttgttagggttctgactcttcccaatctctcttctcttacaaaaggaggagcagaaaacttattgtacagatcaggttcctctccgaataagaaacattttcacatacaaaaaagcacttaccaaccttcatatcaggttattttgatatcattgaaactgcctttttcttttttttcatccttgtttctgaactgtgaataaatgagaatttgcttaaaaaaaaaaaaaaa

SEQ ID NO: 295 - DNA, 1568 bp, Xenopus laevis
gtgactttctgaaataatcgctacagagatgctgaaagctgtcatcctgattggtggcccccaaaagggtaccaggttccgccctttgtcctttgaggtgccaaagcctctatttccagttgcaggggtgcctatggtccagcatcacattgaagcctgcagcaaggttcccaatctaaaggagattttactgattggattctatcaaccgaatgaggctctgaacagcttccttctcaaagcccagcaggaattcaaagtagccattaggtacctgcaggagtattctgccctcggcactggaggtgggatttaccacttccgggatcagattctctctggtgggccacaggctttttttgtcatgaatgcagatgtctgctctgagttccctcttgtctccatgctggacttccacaagcaacatggaggctcacaaagctacgtcatcttaggaaccacagccaatcgcacacagtcactgaattatggctgcatcgtggcaaatagggatacacaagaggttctgcattatgtagaaaagcctggcacctttgttagtgacatcattaactgcgggatctacctcttctcaccatccatcttccagcacatcgctgaggttttccagcaaaaccagcaggagctgcagcttgaggagaactcaagctggcagcgcatggaagttattcgccttgagcaggacgtgttcagcaccctcgctggacgcggaaagctctatgtctacaaaacagaaggttgctggagccagattaaatcagcaggatcagccatttatgccagtcgcctctacttgagccagtatggcacaacccatcccgagcggctggctagtacaaaagagggaggtccaactatcagaggcaacgtatatatacatcctacagctaatgtggatccctcggcagtgttgggccctaatgtatctatcggtatgggggtgactgttgcggccggagtgcgaattcgagaatccattatcctgcatggagcagttctgcaggaccacagctgcgtgctgaacactattgttggctgggatagcatggttgggcgatgggcacgcgtggaaggaacacccagtgaccccaatccaaacgacccatattccaaaattgacagtgagaccctgttcagggatggaaagcttaccccttctatcacaattttaggttgtaatgtatccattcctgctgaggttgtgatattaaactccattgtcctcccacacaaagagttgagcagaagcttcaagaaccagattattctgtagtggacagagcagctttaggattttctatttggtgtgtgtatatatggtatgccccagcagaaagcaggacctgtcccactccagaagcctctgatgcattcagtgacaatgctagggataaaggaaggatatctgctgcaccatttgctatgagactggctgaaagtacagacttaatggtattgtgtaataggcaccagtcactctgtgcaaatgaactgtcttttaggtaaataaaactgaaagtgtgtgcgcttaaaaaaaaaaaaaaaaa

SEQ ID NO: 296 - DNA, 2234 bp, Xenopus laevis
cccacgcgtccggggacgtggtacggctcggaattacggagagggtgtcacatctcaattctgcggagttaaatgcttctgagaagatggatgtctgtatgccatgagaacataaagtgggacaccgtttaaagaaataaaaaggtcccagtgctgaacattgtgtgtttggccagaaaatgcctggagactcctgacccaatatgtcagccacggctgtcgatggctctgatgtttcacttgatggggattccttccactcagtgggtacagtgctgcaggactcggctggctcggttaagttgcagataaaagaagagcggttggaatctcaagaaagcgcctccctgccaaatgagaatgaagtgctgggaactgatggagagggctcctctcagagtgctgcagaggagccagagcggaaaaggaaaaagggtcctgctccaaagatgctggggaatgaagtttgcagcgtgtgtggggacaaggcttccggcttccattacaacgtgctgagctgtgagggctgcaagggctttttccggcgcagcgtcataaagaatgctcagtactcatgcaagaacaacggcaagtgccagatggacatgtacatgcgacggaaatgtcaggagtgtcggcttcggaagtgcagagaggcgggcatgcgagagcagtgtgtcctttctgaagagcagattcgcagcaagaagatccggaaacaacaagacgaagatgtaactcgatcttcatctgctttggttcctccaagcccatgcatgctatcccaagaagtcgttcagctcacacctcagcaagaaaaaatgattgagcagctggtatccgctcagcagcagtgcaacaaacgctcgttcagtgatcagcccaaagtaacgccatggccacctggaacggacccaaacagcagagaagctcgacaacagagatttgctcactttacggagttagcgatcatttctgtgcaggagattgttgattttgccaaacaagtacctggcttcctagaactgtccagagaggatcagatcgctctactgaaggcatcaacaatagagattatgctgctggaaacagccaggcgttacaatcacgagaccgaatgtataacctttctcaaggacttcacatacagcaaagatgattttcacagagcagggttgcaggtggagttcatcaatcctatttttgagttctctcgaggcatgaggcagatgcagcttgacgacgcagagtacgcccttctaatagcgatcaacatcttctctgcggaccgaccaaatgttctgaatcaccagcacgtcgaaaacctgcagctgccatatgtggaagccttgcactcctacacccgtattaaacgacctcaggaccacctgatgtttcctcgcatgttgatgaagctggtcagtctgcggacgcttagtagtgtgcactcggagcagttttttgctctccgccttcaggataaaaaactgcccccgttactttccgaaatctgggatgttcacgagtagcagcatgtgtgctagataaacagttatggatagctagctaagcatgctcttcaaggaaaatatgattggctgcagttcgagtcagctgcccagcagggatcgtgtagatcatacaccagtgataaagatgtttctatggatgatctgattttgttcagccaggctgatgacttggggctcggagcagcttcctattaacacttgcgtagctgtgctctttctggtcagtaggttaaaacccatgatagggttagagtgttggcgacattcccatcgtgcagaaaggttaacattagagttcacagaagtagacaagagttggctttatccatcgtcctcacccttttgtccgtttcaaggtatatttaaaggatattttgtacagagtcttggctattggacgtacagtagaatcaccttggatttataccaacggatgtgcaacatttcggcatggacagaatctgatcaatgttgtctgcgcgaaccactgctgcttccgtcatgtcggcgtattatgggtctgcctcagcagtgctgtacaatggcctccgtgtggccttgatcgactaaacactattcaagcttttgattcccggcttcctcaatttcttctttcttcccagatctcgcacttgtctgtacattaagttttttccttaagatgcacttaaattgtggtcgctcgctaaaaaaaaaaaaaaa

SEQ ID NO: 297 - DNA, 3660 bp, Xenopus laevis
cccacgcgtccgcggagtcctgacgaggggatagcgctgtacatacaccgctggtacccggccattcagagagagagcgacaaggcgggcgaatagagaataatcagcatcttatccattgcaatcccttgagtagcgaaacatcaggcggcccctgagccagacagttccgtgcccacgttccccaagatgaaggagtcggagtgtaacggcacctcctcccccggggagcaccctgtgcctctcgctctgtatcgtcccggagactccgcaccttccccgggctgtggcccccggtgccgccggttcctccgggggaatgtgctggtgctgctgactgtgatgggggtgattttaggcgcagggctggggatggcagtgaggccgctgaatttgtccaaagctcatatcgcctctttctccttcccgggggaactgctgcttcgcctgctcaagatgatcatcctgccgctggtggtctgtagcctggtgtccggggccgcttctctccagccttctgccctgggcaagctcgggggatgggccatgctcttcttcctcatcaccacgctgctcgcttcaagcctgggagtctgcctggcgctgctcattcggccgggggtgggagccctggtggagtccggacaaggagatggagtacctgagggcaaggacgtggtcgactcgttcctggatctgatccgaaatattttcccatcaaacttggtgtctgctgcttttcagtcgtatgccacgagctacaaacttgaacatgtaaattccagtgtacttggagacatgaacagcacatgggttaaggttccctatgggcaagaggtagaaggcatgaatatattgggcttggtggtgtttgccattgtttttggaattgcacttaggaagttgggccctgaaggagaaattcttattcgtttcttcaactccttcaatgaggctaccatggttctggtgacatggatcatgtggtatgctccacttggtattatgttccttgtggcaggcaagattgtggagatggaagatgttgtccagcttttcaccagtttggggaagtacatatcttgctgcattgttggccatatcatacacggtctgctggtactcccgctcatttattttgcctttactcggaagaacccataccgcttcctttggggtattgtgagtgcactggcaacagcatttgggacctcctccagttccgccacacttccactgatgatgaaatgtgtagaggaaaagaatggtgtttccaaacagatcagtcggttcatccttccaataggagccacggtgaatatggatggtgctgctctttttcaatgtgtagcggccgtatttattgcccaacttaacaacgtctcccttgacttcatccaagtcattacaattcttgtgacagccacagcttccagtgtgggagcagctggtatccctgccgggggagtcctgactcttgctataattttagaagctgtggggcttccaacaaatgacatttcgcttatcctggctgtggattggttggttgaccgcacatgcactgtactaaatgtggaaggtgatgcctttggtgcagggctgctgcaggtatacagcgaccgaacatcttcaagtaacgatggggcagaactatcagcagtgcaagttgaaattcctggagaccatcctgaaggtgacccactcctacaaaagcacacacaattaaaaagcgatggtgcaagtgctctggaaaaggagtctacaatgtgaggaactactggctgctgaatgagcaaagttgggattattgtcaattcagaacacgaggactcatctgattctgggcctggacgaactgtacagctcaagggcttttatttttatatatatatttttttaacttatgttcactgttagcagggcagttaggttctctcattgaatcaggtcagtcctttttttattttaagtcttagagcaagcttcactagcagaaaagatgtacatactcatgtgtttacaatgtggtgtatattgatgctttccacttcactccagaatgggctttaactgagctcagtgagccctgtggtcaacctacaggagtgatcagcagcactaaatgtaaaaatgtgtttgtgaacattattttttttctattgggttcagcaaaaatctgtatttcagtgtgtttagtcccaatctgtttatttgtgttgacattttgtggaatgtattaaaagatagcacattacctgcaatttatgggaaaaagcacatgggtacgtaccccaaggaaccgactagggcttagggacatatttaccctaaacctgaaggtataagacattcaacacatcaattccattaaaggggttgtgtactttaatattagaattttagtgtggtgtaagccagtggtttccagattttttttttttttagttttaagcccccattttgaggtctacagtttgttttgtgcccccctgtacctcttaatattaagcattgctatatcatccattcaggcaacattccagtgatttctggcacaatatattaatattcactgcccaaaatcctaatgacctccaagcatagcttccaggagagaaacatggggctaggccctccgttttgaaaccactggtgttagaatagaatgctaagaatttccacctaacctttaattatttatttaagtttttaattttttgaattatctacaatttgttctgcaaatttgattgctagagcttaattaccctagcaacacagcagcatcttgaaagtcagaatgggaatgaatagtaggggcctaaaaagcaatccagagaaacctacattttacatcccctgattttaagttttccctaattttacactaattgtcgtggtcccaccaatatatgatgcataatgaaatttcctgattttgcctttccttagatttttttcatcatttctttttctggccccatgaaatatgtataattagggtttctggagttagtacagacaaccagataacattttcagttgcagccacggaaaggcagaataggaagataaataagtcaaaatctgtacaaaatatgaaggtgaaatgaaaagttgcttaaatatgtcatagatggactttcatagagtaagttaaaggtaaaatttccctcgagagaggatattcctgaagggttgcttatgtgaggtcaaattcctcataccctgttacacacaatgctgcagggagctgtgtctttatatgcagccctaatgtatatgtatgtatggtatatgtatatatgtctgtgtgtattgttactttgtgggatggtcatacctgagtttattacaaagtgtttacgtatttggaccaaacaagagcataattgaataattgcaacattgtgtacataagtcttttttaaatacttttacgcaacttctttgcaatggaaacacttgccatgcgatgaatttgtgtattaaaacataaatctgtcattttcccttaaagtagtacatgggataagtactatacactacagcacacaaaccaaacaaggctgcccgtgtacacgagtgtgcatgcactaatagaccccaaagatgaagtaataaaaaaaattgtaaatcttaaaaaaaaaaaaaaaa

SEQ ID NO: 298 - DNA, 4274 bp, Xenopus laevis
ttctgaagggcatcgtttaaaaaagggcatttaagattttttttcccttattctggatgcatgtgctcattatttcttttattggcattttctgagcaagaaggatggatgaggaattccaatgaatattgcatgagctggtgcattcagctgaatgaatccagtgacagtttgtagcttgcagacaaacctcattcacaacagactaccctggtacggaaaggactttggtgcagtatcagagaagccgtcaagctcatgaagccctcccacccagctgtggttagtaagtatgtcatgatggtacgttaagcaggtttacaatctgcatttagttgcctcatcaacaagcacactcttcatcctgcagaattaccttcaggtgatatgttttttgtaccaggcttctgaagcattgcctaagatatgacagcaaaagaatcttccaatgaacttgctacaccagattcagatatatacataaagacttttaaagaacatatgcacttggagctggaacttcccagactttctgggaaaaggaccacaacatcaccaaaaatctctccgagaagctctccaaggaattccccatgctttttcagaaagttgcttgttaataaaagcatccgtcaacgccggcgttttacagttgcacatacatgctttgatgttgaaaatggtcccaccccaggacgtagccctctggatcaccaggctagccctggctctggactggtgctgcacaccaactttacaagtcacaaccagcgcagagaatcctttctgtatagatcggacagtgactatgatttatcaccaaagactatgtccaggaattcctctgctgccagcgagcagcatggagatgacttgatagttacaccttttgctcaggtgctggcgagtttgcgcagtgtgagaaataattttacagtgttgaccaatgtacatggagtaccaaacaagaggtcaccaatgactagtcagcctcagatctccagagttaatcatcaagaggactcttatcaaaaaattgcaatggacactttagaagaacttgactggtgcttggatcaacttgagactatccagacctacagatcggtcagtgagatggcatctaacaagttcaagaggatgttgaaccgggagctgacccacctatcagaaatgagccggtcagggaaccaagtgtctgagtacatctcaagcacatttctagacaaacaaaacgatgtggagatcccgtccccaacgcagaaagacagagaaaagaagaaaaaacagcagctcatgacgcagattagtggagtgaaaaagttaaagcacagttccagcctgaacaatactagcatgtcacggtttggggttaaaactgactatgaagacatgctctccaaggagctagaagaccttaataaatggggactgaatatcttcaaggttgcatcctactcatgcaacaggcccttaacttgtatcatgtatgccatatttcaggaaagagacttattgaagacgtttaaaataccggtggataccctgataacctacacaatgaccctggaagaccattatcattcagatgtggcatatcacaacagtctgcatgctgctgatgtcactcagtctactcatgttcttctctctacaccagcactggatgctgtctttactgatttggaaatccttgctgcaatatttgcagctgcaattcatgacgtggatcatcctggtgtctccaaccagttccttatcaacacaaattctgagcttgcactgatgtacaacgatgagtctgtattagaaaaccatcatcttgcagtggggtttaaattattacaagaagagcattgtgatatctttcaaaatcttacaaagaagcaaaggcagtctctcaggaaaatggtgattgacctggtacttgctactgatatgtctaaacacatgagtctgttggctgacctaaagactatggtggaaactaagaaagtgacaagctctggcgttctcctcctggataattacactgacagaatacaggttctcaggaatatggtacattgcgcagacctaagcaatccaacaaagtcgctggaattgtacagacaatggacagaccgaattatggaggagttctttcaacaaggagatagagagagagaaagagggatggaaataagcccgatgtgtgacaaacatactgcttccgtggaaaagtcacaggttggattcattgactacattgttcatcctttatgggagacatggggagatttagttcagccagatgctcaagatattctggatacattggaggacaataggaactggtaccaaagtatgatacctcagagtccttctcctcttttggatgaacatgataaagactgccaaggactttcagaaaagttccattttgagctcacccttgaggaagaagattcagacgggcatgacaaagatggagattgtctcagtttttatagcagtacaaagacacttcatatagttgatcaggggatggaggattcaccagatgctgacaccgagttactaacagatgatacatcaccattagatacctagagcatggctgaaagagaacttatgacaaggaattcaccatgcaagctgtccgttatgacacgcctgttatctggatcttaggcctctgggtggttttggccaatagatctttcctgctacttccttgatgccggagtcatggtttgagatgttgaagtgtatgattgctcaggaaaccaaaagatggtgtgaatatctaactttgtttcggggagaaaaaaactgcaacacattgttgtgttcctggaactgcttgaattgtcagtgaacagtttgtaggaaatagtgacacaaaactgagagattttatacagtaagaattttgaaactaaacaaaagctagaaactagaaactatacttagtaggtatatgttgaaatcctgtccacctgtttgaggacgtgtgtgccttttttgtataattccatgtcttttcaaatgcctattaattacacaatattttgtgtaaatggaacaaagaattattactgataatttgattctttctgaaaagaacagtcttccttttacttgggcaatatatgtaacttttattgagtaattcagaacaagaatcaaaaaggagacaatatatttgcgtctcctcatacttataatattgtcgtggttcattcgtatcaggtcacgccatgcaaaagataacatgtcgccatttatttggttttcccacaatatgtttcttttctgcacaatgtacaacaatactgaatatacactacatttgaaattaggaaggcagtatgtgatgtgatgtgtgtaccaaccgcatgttccagatttttcttccttcgtttttctgttttcatacactttacccttcgatcaccaccagttttcttgcactgccttgagcccttacacgtgctttactgtttataacagtgtatttattatctgatgtaaataatgtaatgttttgtaagttattaatttatattaacagacattgcctgtctttggtggtgttaattgtgtagaaaactctaggtaagagttaaaaatttcttgtaacttttttattggacaagcagaaatgcctgaacagtggctcagataaaaggcataatcaacccacggagtacaaatggaagaatcatttaaggaggacttgattctataatttgggtaatagtgctaaagaggggtttacagctgtggtcctccaattgctgttgaactatggtataagttgtagtttaccaggagtttcgggaccacagtatagacattcctaaaagaaaatgagaatcagccccttggagagtctttcatgtctcagacttccagctagcctcaaatcaggtgcaattttcttatttaataccaagatgtgatgttattttttttaatgtgcacctttttataataataaaaaattgtgctctttatgaaagtttttttgtctcagcttgtagaaaattccaaagctttggtccagtatgtgactaaaccatttgttaaggtagcacctttgtgcatgaccaatgggtttgtatgtcttgtcagacactgcagtgtttcaggtgtttcttttatttggagacgtttcccacaatgttctggtattgtatattgtgctaatatgcattattttttataatgagtgaataaacaagccaagcatgagaatttaaaaaaaaaaaaaaaaaaaaaaaaaaaaa

SEQ ID NO: 299 - DNA, 765 bp, Xenopus laevis
caacgcacaaggcacagctgatcctaacaattttattttctacaaatatatggacttggcttggtgaaatacctggaaatgacttggacaagatttcagctggtgtgtttgatgcttcttgccttcacctgcagtgcgatgtgctcagattcagaagaggaaatgaaagctctagaaacagatgttctgagcaatatatactcatccaaggtgaataaagcaagactcccatattggaagatgactttgctaaatgtgtgtggtataataaacaatttaaataaccaagctgaggaaccagaagaaactggtgaagatgagtttcttttaagaaaacaataccctatggatggtctcaatttggaagcaatgctgacaatagtccaacttcagaagatttgtcaaagcagaggcttgcagcactgggagttcatgcaacacgattacttagaacctaacagcccaaacagtgaaaaggatgaacccataaagaggaaaacaccttacattttaaaaagacaaacatatgtaagcaaagcaagaagaccttacatactaaaaagaggatcgtattactaaaatattgaacataggaaaatggtgtatttcatttataagtaaatgtgatttatggttattttgtttacaattaaaaatatatttgtgtgattaatatattggaaaaatattgtcatttatactaagtaaatgtgagtttattcaaaaaaaaaaaaaaaaaaaaaaaaaaaaaaaaaaaaaaaaaaa

SEQ ID NO: 300 - DNA, 1395 bp, Xenopus laevis
ggggaggagtggatgctgcagccttgtagctatctgtacattagacaagtcgttacttggaagcttttttctcctcctcttcttcttcgacaggaggcagtgcagagccggggaccctaggaaggtgcattgctggtggcccggttgtcctgctgtcatcatgactctggctttgctgcttcttctgctgggtacccttgtactctctcaagcaacctctttgtataacagcccgctgacagccaatgaccggcccatcatcggtatactagcacaagagacccattttgatgagttgcagacgtttggtagatcatacatcgctgcttcttatgtgaagaccattgaatctgctggagcaagagtaattcctatactacttaatcttgcagaggaagagtatcaaaagatcttcaactctatcaatggaatactgtttcccgggggcgctgttgaccttgtaaaatctgaatatgcacgagttgctaaattattttacaactgggctcttgaggccaatgataaaggtgactattttccagtctggggaacatgtttgggatttgaggagctaacttatctcacaagtggagaaattttactgactttgactgaaactgaagatatttcattgcctcttaactttagcgcaaatgctctaaacagcaaattatttaaacatatttccaaggagttgtatacagctctctccagcaagcctataacggcaaacttccactactggagtctctccatgcagaattttactaagaacgagaagctgagcaaattctacaatgtcttgacaacaaacgcagatggatcagtggagttcatttctacgtttgaagcctatgactatcctatttatggagtgcagtggcatcctgaaaaaaatccatttgaatggaaaaaggcatcaaacatatcccattcctcagaagctgtgagagcagccttttatatggctgaattctttgttaatgaagccaggaaaagttcccaccacttcactgaagaagaagatgagaccaaagctttgatttacaattacttcccaaaaaatactggaaatatttctgtatttgagcaaatgtattttttctaattgtcaatgtgtgtccaaaagtgcattttatgtagtaaggctgtttgtgctgtgcactattttcatttgcagctatagctaccatgtgaaaagccttactgtcagtttcactacaactcaaaaaagaacccttgtttgtctaatttatctgccaataattataatccttcaaactccatgttgtaaaaaaagtctgttgcagtaatgggggttattgtaacactcaatgttggaaataaaagaaggaagtgcagtgttaaaaaaaaaaaaaaaaaaaaaaaaaaaaa

SEQ ID NO: 301 - DNA, 2505 bp, Xenopus laevis
cgtgtagcctgtagcatcgctgatcacgtgctctctctcagtccggctgagccagtgcagcgcctactgtcagtctgtgcagattcacctgtcgtcttcctttctacagccccgcgtagttaccatggcgacagagcgccagtaccagctggtgatacttggggcttctggcttcactgggcagtttgtggttgaagaagtggcccggtctgccgatagtgaagatttcaggggccccgggctccgctgggcagttgcgggtcggaacaagaagaagctggaggaagttttgcagaatgcggcacagagactgtctaagccacaactgaagactgatgttggcataatcatctgtgatgtcagtgaccctccctccctcgctgaaatgtgcaagaaggcctctgttgttctggactgtgtgggaccatacagattttatggtgagccagtggtaaaagcctgtgttgagaatggagcacactttgtcgatataagcggagagccccaatatcttgagggaatgcagctgaagtataacagccaagcagcagagaaaggtgtatatattgttggcagcagtggttttgactccattccagcagatctaggtgttttattcaccagaaacagcttaaaagggactttgactgcagttgaaagtattttgtctttgcaatcaggaccaaagggcacctgcattcatgatggaacatggcaatcggccattcatggaattgcagatcagggaaatcttaggaaattaagaaagcagtttgcatataagccccttccagtagttgggagaaaaataaagaggagaggggcagtgttttatagtaatgaactgaaggaatatgccattccgtttttgggagcagattctgctgttgtcagacggacgcaacgttatctgcatgagactctgcaggaatctcctgtgcagtatgctgcatatgtagccgttggtggtattacatctgtgattaaactgatgtttgctggaatcctgtttttacttttcacaaagttcagctgtggacgaaatcttctgatcaaattccccaaattgttttcatttggctatttctcaaaggaaggaccaacacaagaacagatggatggagcatctttcacaatgacattttttggtgaaggttatagccaagggcacaatccacaagatgggaacccaaatgtaaagatctgtactcaagtgtcgggtccagaagttgcgtatgttgctactcctatagcaatggtacaggccggagtgaccattttaaaggaaccaggcttgcttccaaaaagcggaggggtgtacacaccaggggctgctttctctaagactaatttgattgaacgcctgaacaaagctggtctccacttctctgtcatcagcaaaccagaagtctgagaagcattagaagcagggcatgtacaagcatggctaactgggaaaccgtccactcacacgcaaatacacgcttaacttttattgatgatttctaacggctcataaatggcctattgaattactacattaaaatctgtgttctaacaatgttttctgtgttcacgttatattttcttaaagtgcataaataatttgattctagtagaaaactttgttcttttactgatgaacttagcaccttccatttttagtcctaccagataccataaaatcacagtatctgtattgttctcaagacataaaatccgttcactatgcactgcatttaaaaacaaaaatatgatgctttgtttttatttagtgactttccatagatatagagtgctacaggcagcacagaaagttaatttgaaaagtagaaacgtaagcatctttctggcatgtcagataatgaatagaggatacctttagataactgccacttccagacatcttttctagagactttctctccctgtcaaatgtataagtaaggaatcttaaaatagatcagtgtcacaagtgaagcagctctaaggatatattctagtaccagaatcaggacaacttttacaagagaaacgtaaagttacgtatctttatgtgatatgtagttgatcgggtagagatttgcatttacttggctaatgattttatagggctgctgtaaacttagctttaccagcaatgcagtacttaattcactatctgcaacgtcctttccagtcaaaagtaagcatacatactgtatctagggggtaccttggcaaaatttaaaaaatatggcacttgtatatggggaatgtccagtgcgtactcccatcctcatcccacaagatctactgaactgtgactgaatggtatataactgtcaaccagacactaataatttctttcttcttattccgctttttgtctctctccctgtcctcttctattggacctatttgtagtttcaactgctctgttgtctttctatttttattacatatctgtttaaaaagcaataaagaaaatcttacaaagaaaaaaaaaaaaaaaaaaaaaaaaaa

SEQ ID NO: 302 - DNA, 1428 bp, Xenopus laevis
gaagactcagtgaagactcagggagctgcatgtgagagacacagaaagaaaaggaggggaatcagccaagtgcctccaagtctctccccccacagccactgaaggattccccaccagcttattgactgtctgccaggaacaggaatcagtatggcagcccagagtcagaagaaaagctgtgggcagataatgaatgaatttggggaatttatgtggaacccaaggacccgggaattcatgggcagaaccgcaagcagttgggctttgattgttactttctatgtggcattttatgccttcctcacgggcatgtttgccctctccatgtgggtgatgttacaaaccattgatgaatacacccccaaatatggggaccgacttcctagtccagggatgatgattcggcccaaaacagacactctggagattgtttataacatcaatgatgcctcaaactctggctgggggggctacgtggctaaactgaactctgctctggaaatgtacaacgacagtgtgcaagtgcaacaggggtcagtgtgcaacccgggggtgtttaacagacaggaggatacgggggacgtgaggaattaccccaagaaggcctgtcagttcctgagaagctccctgggcaactgctctgggctcagtgaccccacgtatggctacaaagacggcagcccctgtgtcctcatcaaaatgaaccggatcatcaactttctccccgaagttattccaagtctctccaactcctccatcaccataaactgcatgggcaagaaacccaaatctgctcagaatgacacgagcacagacattgagctcatgttggggagccgcagttattaccccagtgatgggacagatttgggcaccatggatctcatgtatttcccgtactatgggaacagagcacagaagaactacacgcagccgttggtggcggtccagttccataacatttctctgaaccaggacctttatgtggaatgtcgcgccaacgccggcaatatcaagagcgataacgagcgagacaagttttcagggcgcgtcaccttcaaactgcgcatcaacaactgaaagcaaatgatcagtggcgtcacatggacccgtcacacacatctcccatcatgcctcacttggcaggaagctgccgtattagttacttccatagtctcttcctaatcaggaacacaaacaaagggatgggtgcggggcttgctcaatatatgaattatattttttacatgaaggatttgtaaccaatagaattgtatatacgaattatcccttccacttcctgactcctccgcagtctcagtgactgtaaataaaacagactgtccttctggccccaatgcaacatattcccataagtgcaataaaggcgcaactgtcatctaaaaaaaaaaaaaaaaaaaaaaaaaa

SEQ ID NO: 303 - DNA, 1850 bp, Xenopus laevis
gtacaagcaatacaacagaaatactactcttgtggagcgctagacacttgttatcttggagctttcaggtcggaaaatgtgtacaataatataattaggtggggcgcctttttttttgtctgtttagcagtgattctgaaatcagaattttctcggacacccctctggggctggatgtgggcgattccgtgctgtcaggttgcacgctggagtttgtttgcaagaagctgaacaacaatgagtaatatttatattcaggagccaccgtcaaacggcaaggttttgctgaaaacaactgctggagaaattgatattgaattgtggtcaaaagaggcgccaaaagcatgccgaaacttcgtccagctgtgcttagaaggttattatgataacaccatatttcacagagttgttccagagtttattattcaagggggagatcctacaggtactggaacaggaggtgaatctgtgttcggtaaaccttttagggatgaattccattcacgtctccggtttaatcgccgaggactggttgccatggcaaacgctggacctcacgataatggaagccaatttttctttactcttggtcgtgccgatgagcttaataacaagcataccatctttggaaaggtgactggtgacaccatatataatattctgagactagcagaggttgatattggagaggatgagagacctgtcaacccacacaagataaaatgcacagaggtgctttttaatccctttgatgacataatccccagaatagataaaaagacaaaaaaggatgaagaagaggaaggcaagaagtccaaagcaaaaggcacaaagaattttaacttgctttcttttggagaagaagcagaggaggatgaggaagaggtgaatgaagtcagcaaggtcatgagaggcaaaagtaaaagcagccacgatctcttgaaagatgacccccgactcagttccgttccagcagtggaaagagaaaaagattctcagagtgcagacagtgacaaagatgaggatgaaatgagtgatgatgatgatgaagaagaagatgatgaaatggatagtgatgagaagcatcagatgaaagaccgtatttccaacaagctcagaaaagacccaagcaaatccataaaacaagcagaaaattctgatgaagcagaggaaagaaaaagtagccgcagtgaagaattaagaagagaagcacgtcagctaaaacgggagctaaaagcagcaaaagaaaaaaaagaaaataatataaaagaatcagagactgctaaggaagctgaaaacacagttgcaaacagcgctctggaagaataccttaaggaaaaggaaaagtatgaagaagtcagaaagaaaaatacaaacaaaggggtatctagggagcagcagacattagctcttctggatcgattcaaatcaaagctcacacaagcaattactgaaccaccaaaagaggaagaagcgtcagatgtagatgaagagaatgataaaggatggttgtctcatgtcctgcagtttgaggagaagagcggaaaggtaaaagatgcaaacatgcaggatgaagatacttttgaaatctatgaccctcgcaatcctgtcaacaaaaggagaagagaggaaagcaagaagataatgaagcagaaaaaagagagaagatgaactaatgacccagtttttttatgtccacagtcagatcttctttgcatgttaatatatttgccattcaccctcattaaagactgtaacgtacaattcaacttaaatctttttgtggcacttcagaaataaaggaccatgtctgcaaaaaaaaaaaaaaaaaaaaaaaaaaaaaaaaaaaa

SEQ ID NO: 304 - DNA, 2516 bp, Xenopus laevis
gtgcacacaactgaaatatgtataaatctagctacctgcgtgaagtgcacaaggagaaatacgaaagaagtgatgcttttgatgagcaaaaattcgtagactttggcaaccttggcttatcacaggttcaagggctagaaaaccttcaggagctaaatgaaaggtttactaactatattaacagagctagggtactggagcaaagaaatgccatctttaggaagcagctggagaccttccagcgaatggatgaaatctctggcctggaagaggcattcgaagaacagatagaactgaaccaccagagaatccgggagctgtcttctgatcggtcccgtctcgaaagggagtacaaagatgcccagaggatggtggaagaattcaaaaacaaatataaaaatgaatgtgagtaccagctgcatcttaaagacaatcttgaaaatcttaataaggaagcagatgaagctttgctcggcaatcttgagctacagatccaatcacagttcctgcaagatgatataaacgcagcaaaggaaaggtacaagaagaacctcatggaaatccagacctatgtaagcatattgcagcagatcattcaaacgacaccccctgtagcagctattacagtcggcatgggcgaggaaaagctgatatctgaaagaagaatcccaatcttgcagagccagctagaggaatataagagcattctgtgtcagcttcaagcgcagaagttaaaatttcagtctgagaccttgatgctggagcaaaccattaagagcacgcaggagagttatgacgatgaaatacagctgtacaatgatcagattgaagtcctcaagaaaggaatggaggaagcggaaaagtcacaggaaacgttaacgaatgattgtcgccatctagccatatatcagcaatccttagagcatgaacttgagaggtataaacgtatcattgagaatgaggataacagattaaactcggcaatagttggaactccaattactctttttatgcaaagtttcaaatcctctcagatgtcagcaacaagaggaagagatatcacactggctatacaagatattgctacagcaaagccaagacaaaagggttttcaaagaaaaatgttaaaaagaaaagagataccatgcatagatattagtgatattgacaataaacataacgtttgtgagaaaatccaaagtagcatagagaagagccccagggaaagtaaacatgattactctacacttggtgaagcagaattggattcttttaaacctggtgtgagtgaagaagatgtacccgatggggcacagataagtaaagcatttaataaactatatgatttggtaaggggaagaatgatcacctatacaattccagaacccacagctgaattgtttgcaaagagtcgttatgttcttgtaacaggccaatccagttatgaggacccttgcttctattcatctaccactcagaccggtggtaggataagtgttagcatcatccagggtgtgatgccaggtaatgacatcgtacctattcctgagctgcccgaaccttctgaaccttcagacagtggagacgatgaggcaaatatgaaagataaacatcctgaaaagccagaagatgtatcaaggtttgatgatgaagaggaaagaaaaaataagaaaggaaagcaaacaaggggcaaagataaagctaaagctctgccaattattattataccagatggaggcaataagtatgatcatgggcagcctcagatgtattatactggcccaaataatgaggatatggcatcaaaagctttcaaagatacagattgcttgcattccatgagctatgaaaaagttgaggttgaagagtcagttgaaaagacctccaatgacagcatgaagagttacgaagaaacagcaacagttgtagaaactctgattgagaaaacaaggaaaaaataaggagttgatttataaaactgcagatgttacacctaattaattgatttcagctattttaggaagaattatttcatatccaaataagaataattatcaaggacattatattttgatgataactgtatacccttatgggtcaaacagaatggaatgaattactctgcacagggttgaactgggccaacgggacactggggcccttgtggggcccatagcccagatccactgtaactgctgctccctgaactccctccacaagtaggaaaaaatggtaggggcaggggggctggaaaggggttgcagcatgggggccctaagcagcagccccggtgaatcccagtctgaccctgactctgcatggagattgttctactttacccattttcagttttatttatcaaattaaaatgtaaacatttctttagacaattctgcagattctatttcagcagctcagtaaactgatgtaaatacatgtgacatctggttaatttgcatccaaataaaaatcgaattccttgagcacgcaaaaaaaaaaaaaaaaaaaaaaaaaaa

SEQ ID NO: 305 - DNA, 3372 bp, Xenopus laevis
ctggcggctgtggttgcttgtgtggctccccgggggagactggcaacgattgaagcgggagtgatattggaagaggagccttgtagaagacaaatttcaacccatgtgacatcttttgtttacctaacggtgcaccgcagcaataaagggtcacacgccatgtgatagatttcctttattcccaggtgaacctttgctcaccttctccctactttctccctgcatacaacatgaaattccgtgatcaggtgagcacattgtctgactggtttaagggctggaacgaatgtgaacaaacagtggcccttctatctttacttaagaggatcaccaggacccaggcacgcttcctgcaactgtgtttggagcactctttatcagactgtacggaggtacacatccttgagacagaggccaacagtgcagctctcatcagccagtggcatcaagagtccaaagagaaggtgatttctctacttctttctcacttgccactattgcagccccggaatacagaagccaaatgcgagtatatgaaactgctgcaaaaagttctggcttacactactgagagcaatttgtacatagaagagagtcgccagttactatcctatgcacttattcatcctgcgactacccttgaagaccgaaactcgctggctttatggctcaaccatctggaagaacgattctctacaggctacagtcgtcatggaagaatcgaaacaccttctgcacatttacggcaggattcagatgagtggcagcctccagtggatcctggtattggggaggcaagtctcagttggcaggataaaccaccgcgtgaaaatggcatgatgccctttcattcttctaacctagtgccctcaggcattcaaaatatggggagcaacacagtgctgtcctgccaggtgcatccaagtccactcaaacgttccatgtcgcttattccaacatctcagcagggacctggtgaatggatggggccagatgaagtgggaagtcggtcagtgttcctcaccccagaccttgctccactgtctccacagagcagcgtggcatcatccggcagcgagcaaactgaggaagtgagcgctggacgcaacactttcacagaagatgggagtgggatgaaagatgtacccacctggttgaagagtttacgattgcacaaatatgcatcgttgtttgctcagatgagctatgaagagatgatgacgctgaccgagcagcaccttgaatgtcagaatgttaccaaaggggcaagacacaaaatcgccttgagtatacaaaagctccgggagagaccatgtgtcctcaaatccttagaaaaggatattttagaaggcggaaatgtgcgtaatgctcttcaggagttgcagcagattgtcatcacacccattaaatactaccgtcctaaccagatggatggtactggcagggagcaaactccctcacagaggccaaaccaagatccaagctgtaaaggatcagatgagaatcaacctccgcctggactcccagcagatggtttccagcaacaacagagtagcccagcttgtgattctgagccagcagtaccacctatagcagagggagatctcccagggcagcttaccagagtgcttggaaaagtttgtacacagcttctggtgtcccgaccagatgaagacaacatctcgtgttacctgcagcttttagaaaagtgcatttcacatgaggcattcacagaaacccaaaagaagaggctgatgtcttggaagcagcaagttttgaaattactccggacgcttcccagaaaagcattgctggaaatgcagggctgggcgtttgcatccaactctctccccttagctggatctgtggggtcttccatagctcggagaggacagcgtccattccagatgcctcctagggtactgccaccttcccgtattaatgttatgagccctgggtcaattggaggtgtctctccaaggcatgcacttaccagcccgagcactggaagccagggtcggcagaacctgtggtttgccaatcctgggggcagcaacagtatgccatgcccaagtcacagttctgtgcaacgcacacattcattacccgtacacacttctccacagagtattttaaagtttccccctgattgccaggtgcctggggctgatttagagattaacccccggttggagtccttgtgtctgagtatgacagagcatgctttagaagagggaacagacaagacatcgaccatctgatcttgtgcccccgacaccttcataataaggcagaaccggagactctatctcacgtcctcggcctggcagaggcagtgactgctatttcccatcacactctccatgaggctgtcactacatctttctcccaccatgttctaatacttgtttaagctattgtaccctttaacttatccaaacacacagaagcacggctaagcgttcacattgagaaaaggagcttgttctctctgtatgagatgactgaggcaaagttgcatgtgggaggatcccgaacagacactattcttgtaccttgtgctggtctctgttatagtaaagagctgtactgaggtgaggaggagaggtccaatctctcaatatgtgcagtttgggggaaagcaaagcgcaatggagccagaagctcggctaccacactaagctagaggaaaagaaatgccaccataaaaggatgttgaaggctgatgcactcggaaacaaatgtatgattggacaggacagggctgctcacaaaagcatactgggcaatgtgaaaggcatcttaaaaagtcaggagaggttgttaggatttttttctttggacgccacaaaagacaggagtgttggattccataactgcagctatgttgccaatataatacccgcaggggcagtttgtcctgctcataacactaatcttgcagatgtgtggggaagtgtacccctgtatatgtgcccaacctccaactgtatccaaccatatcatgcatttccaccagctaggcctgatcagcccatagccctccttccttgcttacttgtagactagagcttcagtcctgggagctgcccttgttgccacacgcagagcgtggaggttaagagttgggcagtgcccgctgagactgccagtgacctccttctccagaagtattttcagaatatcgctaactatttatttctaacatagaaacacagctccttttcaaatagaaaacaaaaatgttattttagatacattttattatgaataacttttgttatgactatggctggtaaccatgagttcaaaattattaaaagataatgtaaaaatgtgaaaaaaaaaaaaaaaaaaaaaaaaaaaaaaaaa

SEQ ID NO: 306 - DNA, 1790 bp, Xenopus laevis
gggaggcagaggctgtggctgtttcaggcagtgagaggagacacagagggacagactctcacactcggccgccgccgctgctgttggacattaaggggggatcgtgcccaggaggaggagggcgttatgttcccccaattctgccggactccggggatccccgggctgtaccccgacttgtgaagcagatggagttcccggggtcggtatgggaaagatgatctggcccggggtcggtgccctcctgctgccccttctgcccctggcactgggatatctcacggtcaccatagagccgcttcctcctgtggttgtgggagacgcagtgactttaaaatgcaacttcaagacagacggaaggatgagagagattgtttggtacagggtaacagatgggggcaccatcaggcaaaagatcttcactttcgatgccatgttctctactaatttctctcacatggagaattaccgcaagcgggaggatctgctctaccagtcgactatacgtctccccgaagtccgtatctccgacaatggaccgtacgagtgccacgttggaatatacgaccgggccacgcgggagaaagtcgtgctgtcgtcagacaacgtgttcctcaatgtcatgtcccctccggtctccatcgctgtcctagcggccgactctcccgccccattcagccggtaccaggctcagaacttcaccgtggtctgcattgtgtctggagggaaacccgccccgcaggtttccttcaagagggatggtgaattaatagatgtggttccaatgctggagcccccgcctgccgctgcagggctactgggcaatcatccctcaaggaacctctttaaccgcgactcggacgacacgaagatgcaaaaaacgctctcgttgctggacacggaggaaagaggactgagtcctttcacggaaaacccttacagagtgcgtgccgctgaccaaggacccatgtccagccccgtaacggaggcaattccagagactgtggtcagcctggagttccctcgttgggtccacagcacagaccccgcttatttcttccaccaaatgcatcttcccatgagcgatggaaccgtcgaggtccgggccatgctcacttggacactgaactcacaagtggataacgaggctctgtttagctgcgaggtgaagcacccagcgctctccatgcctatgcagtcggaagtcacgttagctgctcccaaagggcccaaaattatgatgtccccaacgagagcccgagtgggcgataccgtccgaatcacagtccatggattccagaatgaagtatttccggagccgcttttcacatggaccagggtcggaggaagactcttggacggcagagcagagcatgatgggaaggagctggtgctggagcgagttccggctgaattaaacggctccatgtaccgctgtacagctcagaacccgctcggctctacagacactcacaccagacttataatattcgaaaaccccaatattccgcggggaacggaggattcaaacagttcggggtcattggacagcaacagactcacttcggtgcttctaatcctgacagtgatctatgaactgacgtgagagccggacgctcggccgaccaatcactggactccaaacagcgtcacatttactccaatcggttttctttcccccctaaactagctccagtatcgttatccgtcgactttatctctgtgttttggcttcttcagctgagaaattaaaaaaaaaattctgtaaaaaaaaaaaaaaaaaaaaaaaa

SEQ ID NO: 307 - DNA, 2706 bp, Xenopus laevis
catccttaaagctcacatacaagaccctgcagcaggcagccttgttccactcagtataaggggggcggtcagggtggatggctccttttgtaacagaagaaaagtcagcaaagtgagaagaagaagaagaaaccaggaggttttatttaaaaaaaaaaagtggaaacaacttctgatactgaaactgtgagattataaaaggacacaagtttattgcctggaaggaacctttgtatattgagagaaaaagagagagagagagagagatatcgactgctacaatgaaggtattgcttctcttatgctcctgtatcttagccatccatgccctgccttttgagcagagaggattctgggacttttccctggacgatggaatggctatgatgaaagatgaggaggcctcgggagtaggtcctacacctactgacagtattccagatgttggtttgtcgcccatgccacctatggatttatgcccttttgggtgtcaatgtcatttgcgcgtggtgcagtgctctgatttgggtctcacatctgtgcccaaaaaccttccgaaagacaccactctcttggatctacagaacaacaaaatcacggaaatcaaaaaggacgacttcaaaggactcaccaacctgtatgctttggttatagtaaacaacaagatatcgaaaatcaatgaaaaggcctttgagcccctgcagaagatgcaaaaactgtatatctctaaaaacaaccttgaggaaatacccaaacaccttcccaaatctctggtggagctgcgtattcatgaaaacaaaatcaagaaggtccctaagggcgtcttcaacggactgaagaacgtgaactgtattgaaatgggaggtaaccctctggaaaatggaggcattgaggctggcgcattcgacggcttgaagctgaactacttacgtatttcggaggcaaaactgtctggcatccccaaaggtcttccaagcagcctgaatgagcttcaccttgacaacaataagatccaggcaattgaaaaggaagaccttaaccagtatgctagcctgtacagactgggtttaggacacaacaacatccgcatgatagaaaacggcagcctgtcttatatgcctgttctgagagagcttcacttggacaataacaaactctccaaagtgcccccaggcttaccagacatgaaattactgcaggttgtgtacctgcactccaacaacatcacccaggtcggcgtcaatgacttctgccctataggatttggagtgaaacgtgcctactacaatggaattagcttatttaacaaccccgttccctactgggaagtgcagccggccactttccgttgcgtcaccgaccgattggctatccagtttggcaattacaggaagtaaagaaggtggaacatgaatgcaggaaccccattgtaagagacataaaacagacatgaagagagcagaagaaacaaacccacaaaaatgaccaattatgtttaatacaagggtgtgtaagacctaaaaacaataataaccccccttccgacacccaagtgtaggtatctgccctgccctgcctgtcttactgtcttctggcgccggtgtatatagaacatggaaggatgtgcaggtagcgctattctcatacaaccacaaattgtgtaaacccaccccagtacccacacaatgataagcttttgctcattgcattgtgcttgaagctcccccttccctttaataggatgcttgtagcattgtacaatggccaaatcaactgcaagcttttggttcttataccccctaccattccaatacagtagtccttgagcagtctgtatataggcttctgcagtcacactaacagctcacaagcacccagttcaatcactctgcttgagctgccatatgtctttattttcatacatatcacccttagaagaatatcattccacttctgtagtctttaaccccttcagtaatgagatacattgcagagcaatggcttgtttaccctcacatcacctgataggtcttgccagcatattggtttcatcatatttaaccccttatttaagttatgatgaccacttttgctttaggagcaattaagcggcctggaataatggcatagcactttttacttgtgtgttcacaacttcatgcaattttatttttaagtagaaaagtcatatgtatcctgcctcgaacctcgctggggaatatgcttggtcacattgccatctacaggaggagaaaaggcactgcatgatttataggcttccaaaaatgtgtccttttaaatataaatttcattaataatctagcaagagaaggagggtgattacactgcatatggcaaagtggaaaccacataacaagaagtcttctagcggaacacaaacattccatttgaaagaccaaagatcagggatgggaagcttaaataatattctggagggccttgccatatctgattatgccaaagaaaccctcccatttatgcagcttatgggtataaatggaaaagtgtatttttaggaaaggtagcagtcatttcagttggtgtctagttattgtatatccagtgcgatgtgaggatggaatacttacaaactgtgctgagcattttttttagcatcaaataatgaagcattaaaatattgtctttttctcccttaaaaaaaaaaaaaaaaaaaaaaaaaaaaaa

SEQ ID NO: 308 - DNA, 715 bp, Xenopus laevis
cagggacaacatatatataatccctttgcttttctctttcaacaaacagctagctgctattgttggactggctttgggaaggtggacgaggaggctgttggaaaggaaatagctacttcagggaattcggactctggagcacagaagcacaaaaaatgccggtcatcaacatagacgatttaacagaaaaggataaagcaaaaatggaagttgaacaactcaagaaagaagttaaactggagcgacagctggtttccaaaatgtgtgaggaaattaaaacctacatcgaggacaagtctggagaagatccactcgtcaagggtattcctgaagacaagaacccattcaaggagaaaggaggctgtgtgattgcctaaaatcttttaggactgtaatcttcagtcaaataagttggtttagaccacctggctcaactggcacatgaagaaccccccctgtatgctgcactgtatggaaagagaatgacttacaactgtccgccctttatgcttctacacttaactgcttcggggcgataacccaaccgcaccgcgttgaggacataacgttttattcagtcctaggccccaggggtaacatgttgctttgcgggttgtactagtttcttttaataaaatatctgtaaatcctgttaatgacctattttatagaataaaataataagttgtaaaaaaaaaaaaaaaaaaaaaaaaaa

SEQ ID NO: 309 - DNA, 1670 bp, Xenopus laevis
ctagaataaggcggacgttgcaggctgagctatggcagatgtggaagagactctgaaacgaatccagggccagaagggtgtgcaggggatcataattgtgaactctgaaggaattccaattaagagcacaatggataatcagaccacagtgcagtatgccggcctcatgcaccagcttgtattgaaagcacgctgctcagttcgggatatcgacgctcagaacgatttaactttcctccgaatccgatctaagaaaaatgaaattatgattgcaccagaaaaagactatttccttgttgtgattcagcagccgactgaataagcccatttccagtacatttccccccagttttgttatacatgtactatttatctcaagtcctttgacggcaaagtttggcatcgatacaagcgaccaagaacacaacatgtttcctgggccaattcaccatccaagaagaaaagcttctattggttatgtactaacccagccctgtattattactttattgttttcccatgtacaatatgaactgaaccccttattattcatttgttattaaaaattcccatcagataaccacggtaatattctctcttgtctttttatgagaaacccttctaaatggtttcccactgcagagagttactgacaaaggtcatggaaaaccttgtatttatgcctaaaacagtgtgttatatttatcaaagcaatgggggaaaaaagggttcatttagattttgaaaaaagtatccaatcagaggagagaataatctagggatgcaccgaatccacaattttggattcggccgaatccttggcgaaagctttggccgaataccgaatcctaatttgcataggcaaattaggagcaggaaaggaaaaagtagaaaaaaatatttttttgtaatgaaagtcacatgatttccctacctcccctaatttacatatgcaaattcggatttggttcggccaggcacaaagattcggccgaatctgaatcctgatgaaaaggccgaatcctggattaggagcatccctagtataatcacatggttattgttttaaaggacctgtaacaaaaaacgtttctacataacggaaagaggaccaccaagacacatttgactttgaatttgcaaagtctttattgaaaaacaacttaacgattctcctcttcagaaacggtgacagggcgacgatccatcgtgcagcgctcaatttctccactcttccttctataggagataagccagaggggcgaagttgagcgccacacgatggatcgtcgccgtttctgaagaggagcagaagcggagaatatatcttaataaagactttgcgaatttggagttaaatgtgtcttggtggggttttttttcgagttatgttactggtcctttaagcatggtgtctgagctattttaataatggagcatgcagaccacagcagttctacattttactgtaccaacccagatatccattttggatcttgttggccatctcttgagggtcagtgtgcagagctgttattgaagctgatgttacaggggatggtttttaaattcatgatacagaattcacggattactgaactgcattgtaatgggaatctgattaaattgctaattatacctgaaaaaaaaaaaaaaaaaaaaaaaaaaaa

SEQ ID NO: 310 - DNA, 1456 bp, Xenopus laevis
gttcaacactcggctcctggatcggctggtagcagtgagtgagcgctgagccttcctcattcccaagcagcactatgggcaccgcatactaagggcaacaaggcaagatatcgttgggacccagaagcctcagggtgggaatgatgtctcctctttggtggaacacatcggatgcaaagactctgtgcttgttgtagctgagaccaagcagcaatgggactgagcagctctgtgtcccagatgttctgcaggatccgaatcctagttattatatgcctgtgcctgctgctctttgggtgggcagctcttaactcggccgatgtcgcacgctatgcacacaggttcaaacagcccttggattataggtggagagccacttccatggacaatgaagaggagagacagcatgtgactgctgaagagacagccaaagagacagtcaagctctgccctgctctctcccccctactcaggggcgctgtaccactaaagtttgagccttctttaagtttgaaccaggtgaagaaagagaacccccaggtggaaaatggcagataccaaccggagagctgcaaagctcagcaaaaagtcgccatcttgattcctcaccgaaatcgcgagcgacacctcttgtacctgctcaaacacttgcaccccttcctgcagcgccaacagctggactatgggatttatgtcattcaccaggccgggaaccagaagttcaacagagcaaagttgctgaacatcgggtacctggaggcgctgaagcaagaggactgggactgctttatattccatgatgttgatctgatccctgagaatgactttaacctttacctctgtgacactgagcccaaacacctggtcgtgggaagaaatgtaactggctacaggctgcgctataagggctattttgggggtgtgaccgccatgaccagagagcagtttgacaatgtgaacggctattccaacaattactggggctggggaggagaagacgatgatctgcggcagagggtggtgggtcaaaagatgaaggtggtcagacccccggccgaggttgccagatacaccatgatcttccatacccgggatagtggcaacgaggtgaacagtcagaggatgaaactattgaataaagtatcccgcgtctggaggaaggacggcctaaactcttgcgcctatgagttgctctcggttgaacatgaccaactgtacattaatttaacagcagaagttgggcggccagagatctaaatgaacatcaggagggacatagactttgtgagctaaggttccagagacaaggccagtcctcaacatccaaaaggatccttgttcccatagatgacgacacagatgctttctagaaagaaaatgggactttcaaccaaaatctttaaaagattaaaaaaaagaatcaatttaaggccaaaaaaaaaaaaaaaaaaaaaaa

SEQ ID NO: 311 - DNA, 731 bp, Xenopus laevis
gcagcagcagcagagtgcgaggtcccagcaaatcatgatgaggattttgcttgctctgagcttgggggttgcttgctgcagtttgtgggtcggggcagaggtgccgctgcagcctgatttccagaatgaaaaggtcttaggcaagtggtatggcatcggcctggcctccaactccaactggttcaaggacaggaagagccacatgaagatgtgcaccaccatcatcactcccaccaccgatgggaacatggacgtcacagccacttatcccaagatggatcgctgtgagacaaagtccatgacttattttaagacggagcagccgggccgtttccgcgctaaaagcccccgctacggcagtgaacatgacatgcgggtagtggagaccaactatgatgaatacattctaatgtacacagtgaagaccaagggatcagaaaccaaccaaattgtctctctctttggcagagacaaggatgtgaggccagaactgctggataagttccagagcttcgctaagactcaaggactcactgatgataatattctccttctgccccacacggatcagtgcatgacagaagcttagaggctggggatttcacacgtgtcgtgtcatatgtgcccccccatgtaccccaatgggtttagaaaatgcttgtggatatgaatcaataaatgtttgtattaatcactcaaaaaaaaaaaaaaaaaaaaaaaaaaaaaaaaaa

SEQ ID NO: 312 - DNA, 1463 bp, Xenopus laevis
cagagggcagcagtgcagaaagatcataagtcgctgggcacttggagggcagtttgaaaacatgcaggtggactccatcctacacagtgggtatttccaccctgtgctccgggcctggcagagcacggctaccagccttgatgccaacaacctcatgtaccccatctttatcacggacaacccagatgccattgaggacattcccagcctgccgggccaagccaggtatggggtcaaccaattggaaggcctgctgcgccctctggtggacaatggcctaaagtgtgtgctgatctttggggtcccaagcagagtcactaaggacgaccgtggctccgcagcagatgcagacgacacaccggccatactggccatacggaggattcgggaaaagttcccccagctgctcgttgcctgtgacgtttgtctttgtccctatacatcccatgggcactgtgggattctacgggaagatggcagcatacagaatgagagcagttgccagagattagcagaagtggcccttgcttatgcccgggcaggctgtcacatcgtggcaccttcagacatgatggatggacgaattggagcgataaagcaggcgctgatctccaacaacctggggaacaaggtgtccgtcatgagttacagtgccaagtttgcctcctgtttctatgggccatttagggatgccgcacagtccaaacctgcctttggcgatcggaaatgctaccagcttccacctggtgccaggggcctggccattcgggcagtggaccgggatgtgcgtgaaggggcagacatgctaatggtaaagccgggaatgccatatctggatctggtcagagacgtcaagaataagcaccctgctctcccactggctgtgtaccacgtgtctggggaatatgccatgctgtggcatggagcacaggctaatgcttttgacctcaaggtggctgtactggaagcaatgaccggattccggagagcaggagcggatatcatcattacctactacaccccccagctcctcaactggataaaggaaagataaatctgcttccctattgaccccattcagtaaatacccatattttggcacccccggtgggacattgaactgaggggaagggggaataatgtgtagtgactgtccctttattatcattattcatgtgcttttccacctgccctgtcccattgctgcccctggttccaactcccaccaggagttggtagaagtggtgccaatgaatgggtttattgtgtgtatatgtcacactattgcataaagtctctggaccttttatacagccgctgtacagcagccccatgaactcaggagaatccgtgttggtagcacttgcctttaagtcacatgacaggttccctctctccttgttcccaaatgccaataaaccaagttgtctttaaaaaaaaaaaaaaaaaaaaaaaaaaaaaaa

SEQ ID NO: 313 - DNA, 2920 bp, Xenopus laevis
ctcactgacctaccgctgaaacctccttcttcccattctcaccccaggggaacacagatttcctttacaaaagccatgccacagaatgtgcttctccctgggccggctccctggggattcaggcttactgggggcattgatttcaatcagcctttagtcatatctaggataaccccaggaagcaaatcctctgtggctaatttgtgccccggtgacgtgatccttgccatcgatggcttcagcacagagactatgacccatgcagaggcacaagacaggattaaagcagctacagatcaactgtgcttgaaaattgacagggcagaaacaagaatctggtcccctcaggtctgtgaagatggaaaagcacagcctttcaaaataaatctggaagctgaaccacaggatctgggcttctttgagcacaagcacaatatccggcctaagcctttcatactgccaggccgaagcagtggaagcagcaccccttctggttttgaccctggcagtggacgcagcaccccttcctccgtgagcactattgaccctgttgagctgaaagctgcctctaggattgcacctaatgttcccttggaaatggagcttcctggtgtgaagatagtccatgcccagttcaatacccccatgcagctctattctgatgacaatattatggaaagtttacaagggcaggtttcaaccatcctaggagaaaagaccccaatgagcgatccagtccctccctctgtgcctcagtcagatgtatacaagcttctgcatgatgatacagaacatcccagcaagcccaggcagtccggctcatttaaaatactgcaggatatggtcgacgacgaccctgatcgcccatcaggcaccagaagtgttagagccccagtgaccaaaccaaacacaggagcagctgctgtacagaaagtgcccatctgtgatcgctgtggaaatggcatagttggcacagtcgtgaaagcaaaagacaaattgcgccacccagattgctttgtgtgctcagactgcaatctaaacttgaaacaaaaaggatactttttcgtggagggccagctgtactgtgaagctcacgccagagcacgtatgaggccgccagagggatatgatgccgttaccgtctatcattaaatcactaatttgtgtcaatatgtagggccaagctatgaaagattttaagaaagcaaagtttgatttcacagcgcataatatgtgtattattatttcaacaagagactcatccttctgtcaaagaattgaaatggagcctgtgatgtcaactgaacaaagtaatcaaggccccaccagaggttttcttgttcattcggttctttaattagagattttgttttgctcagtatttttatcattttcctggtaaatgttttcttttaagtattgttaaaatcatttttatcatattttattggtgtgctggtgccctttacgaatacaggacttggttgtccatatattgcaatatggataagaattgtataatttccaatatttattgcaatgccctttaacatattgataccggttagtgtagtcgatcattattctgtattctgttactgtaggaacacatccatgtgtcactagataagaaaaggatataaaaatgctcaacgtttagaataagacacaagcttatttccatgcatttcatagaatacatacgtactatagtaatgagagcacaaaacataatattatatataaggcaaaggacttttctgtccctcatcagcttttgtccacttctatttgcgatgggatggcatgctcttggctgttattggggggacatctttctcataggcaacctgcatttggagggcgacaagcttcccaggcctaatctatagtatttaactaaggagacaaagaaaatattgctggataagacaggaggccttttgcagacctcacacttttatttccaatcctgctaactgtggttgactactacgatctccttgaaaatcatatttaaaggaaaaggaaaactatggaggcattatattgccaatagattagccacaatagtgcaagctaaaaaactatatttgttctgcagaatgctttaccatacctgagtaaacagctctagaagttctctctgtttgtttaggatagcagcttccatattagcttggtgtgacatcacttcctgtctgaggctgtccctgctcgctcatagctttgggctcagattacagcagggaggagggaaaagggagggggagagaggaacaaactgagcatgctcaagcccgtgccctggaggtttaaaatgaaaacaggaagtctgatacagaagcccatgtgtacacaatagaaggaaataaatgtagcagcattactttgagtggttattagggtatttatatagacctttctgataaaactttaatttaattttagcttttcctcctcctttaaaacatgtcgtcacaaaagaaaattatgtttaaggaggacatcaataccgatggactaaaatattttactttgtacttaaaactgtacttgtattgcaaccgaacatacataatgacactttatatgtaatcttggcttatgcctggtgactgccaatgtgtcattaggttattgggcttctaaacagaaacgtgtttttaaaattgaatattgtgtaatattgttattgaacatgttagaaaatctgcacacatatactttcactgtgtttgaattgcaatatgcactattaactgtatttgtccttaattagttagtgcttatattattttcatagcctttctaggctcacagtcatttcaattaacatctattcttttgatatataatggaaaatctacaaaaataaaataaaacttctataataaaaaaaaaaaaaaaaaaaaaaaaa

SEQ ID NO: 314 - DNA, 1221 bp, Xenopus laevis
gggcaatgtctcactgctgcggtggataaacagcaccgaccgactgcgcaaggggccaacaacagcccatgttagtgtttcatgtgcttagataaaatgaaccattaagacatttcttctggaatggattcaggcgacactgattttcaggaggactacaagtcgccttttaattttgacactggagttaacacaaattatctgtatttgtctccccggccaaacgccactcctccagattcccctacactactgagagcggatttgctgaaagcagaatctgttccggaaggagaagatgtagctgcaccagaagcagaagtattatccgaggaggagcaagaaaaactcagaaaagagcttgaaagggtagaagaggaaatacagaccctgagccaagtgttggcagcaaaggagaagcaccttgcggatatcaaaaggaaacttggagtcactcccctgtctgaactgaaacagaacatttccaaagggctacatgatgttacctccaccactgtatacaagaggacatcagaaactctgtcccatgctgggcagaaggcctctgctgccttttcctctgttggctctgtcataacaaacaagctacaggatgtaaaaaactcgcccaccttcaaatctttcgaagagaaagttgaaaatctaaagtcaaaagttggtggaaacagacaatctgcaggggattttgaagaagtcttaaactccgcagccaatgccagtgccacagagcccctgacagagaacgatctggagacccaataaaagccgatgccaaaatgctgcaagaaaaccttaaaacacatttctggcatccacgtttcccaacagatctttcccttttctccaagttacctgtttcatctactgtatggatgttcagccttctcccttgattcttgcttcagtacaactcccagcatgctcaacatttgagcatgctgggagtcgtagttcattaacagctggagagttgtaggactcttcgtttcttttagctgttaacccattcagcactaaaggagtttaagatcatatattgtcactttttattgttggaaaagggactttttatgcttcatttcctgtacgttgttccttgtaactgccaagagtttccttacactggaagcacaattttctctgttacactaaagaaagcaaataaatttgtgcgctaaatctcgaaaaaaaaaaaaaaaa

SEQ ID NO: 315 - DNA, 1467 bp, Xenopus laevis
cactcatcccacaatccaccgcggcagacttgctggcctctttactcgcgtagtagtggagggctgcgggattaacacgcagtcaggccggaaacgggatagaattccgcgtcgatgatgtcggcccaggcccaaatgagagctatgttggaccagctgatgggcacagctcgagacggggatgaaacacggcagagggtaaagtttacagatgatcgagtgtgcaaaagtcatctcttggactgctgtcctcatgatattcttgctggaacgcgcatggatctcggagaatgtacaaagattcatgatttggcactacgagcagattatgaaattgacaggaaggagagagacctgttctttgagcttgatgcaatggatcatcttgagtcatttattgcagagtgtgacagaagaacagaacttgctaagaaacgtttggcagagacccaggaggaaattagtgcagaagtatctgtaaaggcagaaaaggttcatgagctgaatgaagaaataggaaaacttcttgcaaaggctgaacagctgggagctgaagggaatgtagatgaagctcaaaaaatccttatggagatggaaaaagtgaaaggcagaaaaagagaagcagaggatgagtaccgtaactcaatgccagcatcaagtttccagcagcagaaattacgtgtgtgtgaagtctgctctgcctaccttggcctccatgacaatgaccgtcgtcttgctgatcattttggtggcaaattgcatttaggatttatcctgattcgtgaaaaactggaattgttgaggagaacggttgcagaaaagcaggagaaacggaaccaagatcgattaaagagaagagaagaacgagaaagagatgaccacttgggcagaagatccaaatccaaaagcaaggatcgtcgaaggtcacgctctaaggaaaggaggagacggcggtcacaatcctcatcccatgatagaaggaggtctcgatcaaggtctcgggaccgacataggcgccatcgcagtcgttcagggagccgcaacagaagtcattaccgtagctcaagggacagaggatcaaagcacaagtaacgcctgtttctaaggagacaataacaaaatcagcagcatctaaacttacaagaagcttttagatgagcagggaatacacaaggaccattatgagactcccaagatccaatgactttccagatggcgaagcttgaagttctacacataagtttgtgttgcggtgtaaataattacacaatgttctgcagattacaagttacggtttttacttcccgaaaattcatctttttttaaacttacatttttattgtttgagctgtgtttgcaaaatagtatgctgcttgccctacattttgaaagtagtgaagtataaataaaagtatttgatttgtccaaaattgtatctcttgccgcattattaaaaaaaaaaaaaaa

SEQ ID NO: 316 - DNA, 2039 bp, Xenopus laevis
ggcagctgctgtcatgcaaattggttttgttcagtcctccactccccgtgtgtaatacctggaagcagacagaattgatgtgtagattgtgcctggagctctgaaactcatggctcttattccagctgtatttttccttctctgggccagtactgcatcacaagcacatggaaacaaacccaactttgtattgttgatggcggatgatcttggaatcggagaagttggttgctatggaaataacactttaaggactccaaacatcgacagactggcaagggaaggagttaaacttacacatcacatagcggcatcttctctatgtacaccaagcagggcagcgtttttgactggacgataccctatcagatctggaatgactggacacgatggaggatatttagttctgatgtggtccgctgtgtctgggggcctcccaacaaatgaaacaacgtttgccaaaatactgcaggagcaaggctacacaactgggatcataggaaaatggcaccttggagtcaactgtagatccagggatgacttttgccatcatccactcaaccatggctttgattattattatggcctactctatacactgatcaatgactgccaagcctccatgccaagtgagatccatgtggcctttcgggcacaactgctattttatgcgcagctatttgccgtgacactgctcactgctatggttactaagcgaatgggatttcttacagtttcctggaaagttcttgtcatttttgcctccgtcggtattatatactttgcctactggtatgtggcctatgagttcttaaggtactggaactgcttcttgatgagggactttgaaatcactgaacagccaatggacctggaaacaacagctgggaagatggttaatgaagcaaagtcctttatcagaaggaacaaagagggtccttttctattatttgtatctttcctgcaaatccactctcctcattttactactgagaagttcagagggaagagtaagcatggactttatggggataacattgaagaaatggactggatgattggggaaataattggtgctatagatgaagaaggtttggtcaacaatacacttacttattttacttccgatcatggagcatatttagaaggcttgcatccagcaggcagaggctttaatggaatttatagaggggggaaaggcatcggaggtttagagggagcaatacgggtaccaggtatatttcgatggccgggtgttttccctgcaaataccattattgatgagcctacaaacctcatggatatatacgccacagtgatcaaacttggaggaggcaagttaccaaaagacaggataattgacggcaaagatctgatgcctctgctgcaaggagtcgattctgtgtcatctcatgacttcatgtttcattactgcactgaccaactgcattctgtccgatggtatcaaaagagcaatcaaacagtttggaaggtccattacatgtctccgaaattctctccagaaggagccggcgcctgctatggaacaaaattttgctcatgctctggcaatggcatcatactccacaatcccccacttctttataatctctctggtgatccctctgagaaaaatccttttccacatgacgtgggaccataccgggaagtggtacaagaaattgagcaagctgtggcaaatcataaaatatctttacacccagtgcctcaacagttgtaccggttcaacaatttctggcaccccaggctacagccttgctgtggaacatttccactatgttggtgtcacaaagaatgagcaactccggaactttctttgtatggatcatcaaagtattcggtttaattaaatcgtgtccatatttccaaaatgtttttcactggtgctgaagtacaacggagaggtatactgtatcttacaaattgttgtgttgtgcttttttgacaactgataaagaccattctgcaacagaatttagcctatataaaccgtttgaactgaaaaaaaaaaaaaaaaa

SEQ ID NO: 317 - DNA, 2308 bp, Xenopus laevis
tgctgacagtgaggtcggggtcggcagatttcctccagtagtagtgactgatttgtttgctcgcagctggggcgggctcaccacaaggcacgggggtgcccgctgttcggactttgcccggggatgttccattgcattcccttgtggcggtgtaaccgtcatgtggagtccgtggataagagacaccgctcgctgctcgcagtcccggaggagatctataggtacagccggagtctggaggagctgctcctggacgccaaccagctcagggaactccccaagcaatttttccaacttgtgaagttaagaaaactgggccttagcgacaacgaaatacaacggcttcccccagagatcgcaaactttatgcagttggtagagctagatgtgtctcgaaacgaaattcctgagattcctgaaagcatctcgttttgcaaagcactccaagtagcagattttagtggaaatccacttaccaggttgcctgacagttttcctgaccttgcaagccttacttgcctttccattaatgacatctcacttcaggtgctcccagaaaatattggaaatttatccaacctggtgtctctcgagctaagagaaaatttgttaacgtttttaccagaatcacttgcacagctgcatagattagaagagcttgatgtaggaaacaatgaactttataatttgccagagaccattggatcattatataaactgaaggacctttggctagatggaaatcagcttgcagatttacctccggaaataggaaatctgaaaaatcttctttgtttggatctgtctgaaaacaaactggaaaggcttcctgaagaaatcagtggcctgaagtcactcacagatcttctagtgtcacataattctattgaggttttacctgatggcattgggaaattaaaaaatctgtctatccttaaagtcgatcagaatcgtctaatgcagttaactgattgtataggagaatgcgaaagccttacagaactaatccttacagaaaaccaactcttggtattgccaagaagcattgggaaattaaagaagctgtgcaatttaaacatagataggaataaattaatgtctttgccaaaagagattggtggttgctgcagtcttaatgtattttgtgtgcgtgaaaacagattgtctaggattccctctgaaatcgcacaggctactgaactgcatgtctttgatgttgctggaaacagattgactcatttaccattatctttgacctcactgaagttaaaggcgttatggttgtccgacaaccagtctcagcctctgctcacttttcaaactgatgtagagccagagagtggtgagaaaatcttgacgtgtgtattattaccacagatgccttctgagcccagtggccaagacaatttacaaagatgtggggcctttgaaagtttagtaaatgacatgtcagatgaaacctggaatgagagagccatgaaccgaataagtgccatacgatttttagatgacacgaaggaagaagatgatgatgaaacggcaactctgttgagaagggcaactcctcaccccggggaacttaaaaacatgaaaaagactgtggaaaacatacgttcgaacctgaatgctgctaaaggattggattccaacaaaaacgaggtcaataatgccactgacagagtgaccacgtctgtgtagacttccacatctcacctcctgtgtcttccctgctgttgaaatgttcctctgcttccaggatcatatccactcctttgtttttaccagaacatgattcatcacccttcccttgtaaccttgtcgaggtgctgcttactggacagaagtgccttatttcagtcagatgcttgcacctgtgatctctaaattaatgctgtaattttatattttaccaatcatgtttttaacaagtggtacacactattgcatatttttaattcttttacttggggtatatatcttttatttttttaactgctgggatattttattaccagttcctttttgcaacacactggtggaaattctatagttttatgtgaaagttataatttttttactttttggcagcttaactggtgtacaatataactataactgtataggagcttgaaaatgtgctttggtttgttaaatagagcataaaggatggtacaaatgtcagtcgttgtaatttgtttatggcactgattcaagaagtatgtttattttatgtgcaccactcagttgtgcgttgtagttcaccttaaaatgtttgcatagaacatgaaaaaaaaaaaaaaaaaaaaaa

SEQ ID NO: 318 - DNA, 2655 bp, Xenopus laevis
gggggtgtttgctagtgttgctagtggatctgcctgacagattttgtgtgaaactttcccgggagaactagacccagagttgtgcccagacaaactgaggatgagtagctccaccaccatgccacctacagagaatggagggggggtggatgcagccattattggaggtgtggcagtagctgtcattgtggtattcatctgcctgttgatcgtggttcttcgctatctatatcggcagaagggcacataccataccaatgaggctaagggtactgaatttgctgaaaatgctgatgctgccttgaaaaatgacccctcattccaggaggccgtagatgaaaccaaaaaggaatacttcatatgatctgaggactccactgtgccccaaatctttccattttctgtttggttttcattaaaggatcaacagctggcaacactaatctcatccctgaaaagagctagtactcatggctcaggaaaagccttatttctcaggtgaacaaaactctgtttgagggaaacaacattgtttcatgaggcctttggaaatccactgttaggtgcatatgatgacaatgggcacattttcccaagccaacgaaatgacaatgtttctcaggcaagccaacatgataatatgtgccaactgcaatgcaacgatggaactaattaagcctttacaacctggacctgtgtttcattagttgaaagcccctaaatactccagcactgaagattgcaagaaaacaccttcagtggttactgaacagtgaaggtttatgcttagttgacggcacaagaggcatttagactccaccttgagtttttattggcagctttcaaaatggaaagaacattataaaaatcctgtattctcaatgctttgcttaatgatccattccatgatacctacagtatagacaaatgtgtgtcaaaacccactgtccagggtatcaaacgatgcagttttttaatgcatctatagtcaaccttaattccccaaatgttattgctctacaactcccagcatctcattaagagacaaggctcttgttgttgtcacctgaatagtgttttactggctcagccaaaaaatcccactattaattagggtggttggtaatattctccagacaaggagatgttctagttttgagtgttgttgttgaattacatttataggatgcaattgatagtgatatctatgtatacttatagggtggttattaagatattccaaagatgttagcatgcagttcagtatcttttgcttctaggtggcttaaagatgtcaataaagggcaaatacatcccggcgtattgctaacggccccagtgcagttacccatagcataaaaggattataactcatcaaggatagatgcttgtggtattgtttttctgtcactggagaatgcatctgctgaagtaagcaatttggcagctccaagtcatgtgcacataatacttctgtttttattggataaatatgtataagtgggacgccaaattgttttcctatagctatttgtgtctacaaaacattcctttaaattggatatatgaagttctacatttgcagtaacagtagctctgttgttagtctctacaaaccatagaacagctccccttgtggtggagaaaatattcttccctctgtcaaaggggaattgaccagctaagacaggaatgtccttcttaaggtccataacgacagagagagatgttaacacttactccaccatgtaataaaatgcacttagtttgcccaggagcagtaacccacagcaaccaattagatgtttgattttaaacaggtgaccagtaaatcctatctgccgattggttgctattggttactgcccctaggcaaattggttgctatggattactgctccatggcatgctttcaaccactaggagagcatactaggtgaatgtggacctccaaaggatttttaatggaccccaggaaaacccaagaactccacatacctctttgtgtgacatagacctctttttggggaatgtaataaaagtaggtaatggaaaaaatgcccagtgaatgtaataaaactttttatcgaaaaagttatgtttgctccagaagattacaacactttcaagtacttcttaaaagtgggtgatgtgcaattaaaattcgcaatgtaataaggaagagtattacattgcgaaatgtgaatttttattcatatttgtgcaaattgattcgctctttgcaacttttattacattcccccatttgtgtgttctcaaataccctatccccaaacatggataatctggaacaacactgagcttaggaaagtcaaaggtaactcccaaatcttatgacaaatgaagatacctattgaaggatgttcagtgacaaagatttatgacccatttttgtaccttaagggaaaataaacgcttgcatttgtgtttaagtaaaatggaaataagatgatttggtatttctaaacaaggagttgcctctgattacagtgatatgcattgcagtttcctctagggctgagaagaataaatatgatggattggactattacattatatatatatatatctttcaagtgactttttaaagtattcatattttaaaagattttaaaaacaaaaaaaaaaaaaaaa

SEQ ID NO: 319 - DNA, 1260 bp, Xenopus laevis
agaatgtctgcgagctacgagagccgacccagagacaatggacccgaaggcatggagcctgatgggatcattgagagcaattggaatgaaattgtggatagttttgatgacatgagcctatcagagtccctgctcaggggtatatatgcctatggctttgagaaaccctctgccatccagcagcgagctattatgccttgtatcaagggttatgatgtcattgctcaggctcagtctggaactgggaagacagccacgtttgccatctccattctccaacagatagagctggatatgaaagccacacaggccctggtgttggcaccaactcgtgagctggcccagcagatccagaaagtagttatggccctgggagattatatgggtgcctcgtgccatgcttgcatcgggggcaccaacgtgagggctgaagtacagaagctgcagtcggaagctcctcacataattgtgggcaccccgggcagagtgttcgacatgttgaacaggcggtacctctcccccaaatacataaagatgtttgtgctggatgaagcggatgagatgttgagtagaggcttcaaggatcaaatctatgatatattccagaagctcagcagtaatgcccaggtggtcctgctctcagccaccatgcctgccgacgtgctggaggtgaccaagaagttcatgcgggaccctatccgaatcctggtcaaaaaggaagaactgaccctggagggtattaggcagttctacattaatgttgagcgagaggagtggaagctggacacgctctgtgacctgtacgagaccctgacaatcacacaggccgttatctttataaacactcgccggaaggtggactggctaacggagaagatgcacgcgagggacttcactgtctctgccctgcacggcgacatggaccagaaggagcgagacgtcattatgagagagttccgatctggatccagtcgtgttctgattaccacagatttgctggcccgaggcattgatgtccagcaggtctcactggtcattaactatgacttgccgaccaacagagagaactacattcacaggattggccgagggggccgtttcggtaggaaaggagttgccatcaacatggttacagaagatgacaagcgcacactgaaagacatagagactttctacaacaccacagttgaggagatgcccatgaacgtggcagaccttatctaaacctcccgccggaggggcagaaaaaaaaaaaaaaaa

SEQ ID NO: 320 - DNA, 538 bp, Xenopus laevis
gccgaacaagccgtagagatgttgatgccaaagaaagaccgcattgctatctatgagcttctcttcaaagaaggagtaatggtggctaaaaaggatgtccatatgcccaaacatccagagctggctgacaagaatgtacccaacctgcatgtaatgaaggcaatgcagtccctgaaatcacgtgggtatgttaaggagcagtttgcctggcgtcacttttactggtatctaaccaatgaaggtatccagtacctgcgggacttcctgcatcttcccccagagattgtccctgctacacttcgcaggagtcgtccagaaactggcagacctcgccccaagggtctggaaggagagcgcccacccagactacctcgtggtgagacagaccgagacacttataggcgcagtgctgttccatctggagcagacaagaaggctgaggctggagctggagcagcaacagaattccaatttagaggagggtttggacgtggtcgcgggcaggcaccccaatgatctactttacgcttttcatgct

SEQ ID NO: 321 - DNA, 2969 bp, Xenopus laevis
gaggaaagagccggagagagggatcggcgtgtgattggccgcggagggtcacgtgccttagctgggctccgagttggcgtacgcggttgtggagcccggtgctcggctggtagggaacagagcggaggggcagagagagccgccgagggccggacagggctgaagagatttctggcgtttggatgggcataggctgccggctgggagtgacggaacccgggaagcgagaggccggagagtgacaggccccgggggtgagagacatccgagcagcagcagcagcagaatggtggaatacattgtggaatacgactatgatgctgtaaatgaggacgagctgacgatacgagtgggagacatcatcaagaatgttaacaagctggaagaggacggctggttggagggagaagtcaacggtaaaaggggagcctttcctgataattttgtaaaggagatcaaaaaagatccagagccaaaagaagagaatgtatcaagtaaaagggagaaatctggaaacgttgccagcctggtgcagcggatgagtgtgtatggaatccctgggatggggcctcctccacagcccaaatccatcaaaaaaaaatccaaaaagcgtcagtgcaaagtcctatacgagtacgtcccacagaacgaagatgaacttgagctgaatgtgggggaaatcctggatgtaattgaggaggtagaagaaggctggtggcgtggaagcaacagtggcaaatctggcctctttccatcaaactttgtaaaagagctggagctgtcggacgatggagagagtcaggagagcactgaagattcagagcaatctgtcacaactcctatagcaacaccagcctcccctgtaccatctccagtgaatggaccggatgcctccccattagccacagcgcagccaaagagggtcatgggtgttggctttggggacattttcaaagaagggtctgtgaaactcaagactagaatgcccgcacctgagccagaagtgaaaaagccagaaaagccagttccagttcagccatcaggtagcatcaaggttctgcgctcagcaagctctgatgcttcaagaacggagacagacaacaaacccaaagccaaggagatgtgcagagccctgttcaactatgaatcagtgaacgacgatgagctttcttttaaggaaggggatattatttgcctgactagtaaagacactggcgacccaggctggtggaaaggagaatttaatgggaaggaaggcgttttccccgacaactttgtggcaataatacaagactctgaaaaagagaagccaaggaaacctccgcctcccattaaaagcccagctccaaagccagaacttcgcattggagagaagaaattaactccaacgaaaacagaagagaaagatgaaaagccattgttggaccttaaacctcccaaacccgcagctcctcaggtaccaccgaagaaaccaagtcttgtaagcaaaagtaacagcctcctaaaaccagcagtaatccctcccaagcgtccagaaaagccggcctttccttcaccaacctccaagcctaatggagatttacttctcatccgccccaagccagaatcagagactcttaataaggcaaagacagagctggaccaacaggttctaagtcgaccaaagtcgacagaagcggaactacataataaagcgaaaacggacctcgaacagatcctgagccgaccaaaatcagaagtggaacctcatagtaagacaaaaactgatctggaacagattctgaacaagccaaagtcagaggcggaacctcttaataaaacgaagatggatctagaacagatcctgagcagaccaaagtccaacggggaacaacataacaaaacaaagatggacctggaacatattctgagcagaacgaagtcagtggaagtagagccggcagctaaaagccccagagacgaggtggacttttttggggatgtgatacctacctcaaaccatttatcccacccaactgcgaacagaccaaagatgcaagggaagaggctacctggtcgctttaatggacccaacgctcaaagcaaagatttaacagattctgtcaaagtgcttaaagaagaggagaatgaaagtgccaaagtaaagacacctgaagtcaaaaagccattggctcccagcattggtacatctccactcccgacttcattccctgtgtcaaaacccgcccccagtccgccggtcccattacctactgaggcgaaagtgaaatcagatgtgaccgacagtaagaggagtgaaaagagtgaaatggacgaccttaaagcccaaattagtgacctgctcagcattgtgcatgcacttagaaaagaacataggaaagagatggatcacctaaagaaacagttagacgaggaacgattgctacggacccatttagagaccgaggttgacaagctgaagaaggcggtccagttaacatgaggcggccatttttttaccccaccaatctagattaaagtccgtgtcagatatttaacgccgtctcctcttctcctcgagttcacggaagcatggtcgagccctactctggcgcttaccttcgttgctttgccaatggaattaaagaggccttatgttcttactgtgctggagtgatgcaggcctagtacaatggttttgcttcgagatactactgagtttatgtacaaagctgggattctgtacgaattttacttgtgtaatttttttttttaaagctctgaatacggtgatatatatatctttagaaataatctgtaatatagtctaacggggaatacagtagccttatcttcacggcgaaaaccatcatgttttgtaaatttttgacttcttatccagggttacacactgttgtgcctgtctgtggtccgagtattcattaaaggagctgtgtataattaaaaaaaaaaaaaaaaaaaaaaaaaaa

SEQ ID NO: 322 - DNA, 1589 bp, Xenopus laevis
cacgcccagagtgaatcagcctggggatccgcttcctgtccgctctgtacctgctgcagtgactcggcgagaagccgcacggacagactcattcccacgcagcctcggctcctgccctcaatcctctcctcatccccgagtctcggagcccgcccgccccatggcgctgaagagaatacagaaggaactcaatgacctgcaacgtgaccctccggctcagtgctctgctggcccagtaggagatgatttattccactggcaagcaaccataatgggaccaacagacagcccatatcaagggggtgtctttttcctcacaattcactttccaacagactatcctttcaaaccaccaaaggttgcattcacaacaaaaatctatcacccgaacataaacagtaatggaagtatttgtctcgacatactaaggtcacagtggtccccagcgctgactgtgtcaaaagttttgttgtcaatatgctccttactttgtgatccaaatccagatgatcctttagtaccagacattgcacaaatctacaagtcagacaaggaaaaatacaacagactagcaagagaatggactcagaaatatgcaatgtaaatttgtgaaagaaaaaaaaagtttaatttcgtataatccgttgtactgtaaattctaggttttttggaaattagaagaggccgagcacagattataattgttccagagttcttcagagctccccccccccccattcccatttgatttttagacacttaaattgctactcagaagcaaaataaaacaaccccccaaatctaagaagagggtattttgtgttcactccctgtatactttgcaaaagacatttcgtgcggtttttaagatacctgttttttttttgttttttgcacctctgctgatcaaatccaaaatggagatttaaccctgaccgcgccaatgatgactgtccaagcaggggttaaagcatccaactctcattaaagactagatttttttttttaacttgagtaatactgcgtattttttttttttctttttgtaaatctgtgttcagattccattctgttagctcactatttaatttgtatttttttactgtatagactaaatatattttatttaccttagtaaggaaactcattttagatcccccttttcccccccttaaaggcgcagtattctcaagacacaactgctagtcttaaaacttttttttttttatagccccagctgtaattattcttaaattgactgcagatttcttaaaaacttcaatgatctttgcactgtaattccgaatacgatcactagagggaaagtgttttttttttgtgttgattctgttgcatacttgacaccagttgattgcaatgtgaactaattgcactgctatgtagagagaaaaaaaaagaatccgtttgtcgctcttcaccatttgatttttttggttttttttttcaatttttttttttcatacgggcaatataaagaaactcacaaatcttttacaactcttactgtagctttttttttccatacaaataaaatgcattttctactaaaaaaaaaaaaaaaaaaaaaa

SEQ ID NO: 323 - DNA, 2937 bp, Xenopus laevis
gcaatcaacacaaagcccacctttagaaatacagattgggaaagggagagcataggaaagaaaaactttatttcataaattgtatagtctgttttattgataaaataaatctggtattatatttttgttcacactagaatccctctttaagaattatttaaaatacatgagcaaaaagagtacaaacatattcacttgttcaggagcacagcacaaatggatacaggtagttaatatagatggtaacattttctcaatatatgtttgtttttttgtttgtttttttttttatttagaacccagcagtgacgatgaatcatatgaagtgttggacttaacagagtatgccagacgtcaccattggtggaaccgcttgtttgggcgtaattcagggccacttacagaaaaatattctgtagctacacaaattgtaattggaggcgtgtcaggctggtgtgctggatttctgtttcaaaaagttggcaaacttgctgcaacagcagtaggtgggggtttccttctccttcagattgccagtcatggtggatatatacaaatagactggaagagagttgagaaagacgtgaacaaggctaaaagaaagattaaaaaggaagcaaataagacacctgaaattaacactgtaattgaaaagtctactgacttttttaagaaaaacattgttgtatctggtggatttgtgggtgggttcttaattggccttgcctcttaaagaactacaggaacacagaaaaatggagctgagaatatggacttgggtggaaagaagacacttttttttttaacttttaggatgttcatggcatatgcttatatgcaaagtggtcatggcattactgagtgcctaatctgtattgatggactgttttttggctagttcatgtatgcgtttattctttgcactactgttcttaatattgatgtttttttagtttctgaaaagttggtgtgttgcatttggttttattatgtgtttttgtcatgaaagacccacaaatattcatgattcccgtactccataaatttgcattacatatttaacagtatgtttgtttttctgagaagtgccaaaacaatgtactgtaactggcaatcaaacctggcagtgattgttatttaaaaaggaaaataatttaatcttgtgcaatatatagattatgaagaaatatataagtagcaaaaatccacttgatggtattgcacggtgtaagtcttctttagagtgacagaaaatataggttgcattgttaaaacgtatgtgaacaacacaaatgattaaaaggcaattattctaattatatttgcattaacacaagaggttttattgatgaaagatctggatgtgaatagaattaatgccccatatcctgagacgtgtctgagaaaatagaagcaaatcaaagctgtaagattaaagtacttgttttaaattagatttgagtagcagtcactggattttttgttctatttatagaaaacactttacactatgatagtcttgtgtcttcactcaaacagaagtccaaatacaccataatctgaaattcgtactgcatctgatatacttgagccaaaggtagcttgtgtggctcccctaaatctgattattaaacatgccgcaaggtatctgctctactgtgtctagggtacatactatatgtggaacacagctgcatcagcttggaaagcattgatttttactgatattgtggttttcaaactggaaatataaaataataggccccaatgtatgtttttactattgcatttatacaacttctggttaaagtgttctcagtgaggtagcgatcctttaagtagtatatcccaggcacaatatgccctgaactctacttttcatattgcagcatgtacatggtgagttttcaattaaataaatgcatacttaaccattcatggtctactttgtctgaaccaggtgcaatgaccccaagcccttagtataaggtacagtctgatacatggaaaataagaattagttgcattacactaaagtaccccatttttcaaacagaagcaattaacttatcggtgcccataaaaaaaatattattattagagatgcaccaaatccaggattctgttaggattcagctttgtttttttttgtttttttcaggattccgaatccttgtgcttgaccgaaccaaatccaaatagttaaaatcatgaccactgaccctgatttgcatatgcaaattaggattcagatgcagtttgtattcggccaaatcttttacaaagggttcggaccaaatcccaaaatagtggatttggtgcatccctacttttaatatttaattcccaacaatattatatgattcattcatggcatacattgtcgtgattttcatgctttatactcactttcctgtttcttgatatttccctatacatcaatttgccagtagttcattatctgctctacttggtgcaggggaatataaaagccaataatgtaattctatttaataaatacaatgggacaaacagcaggatcccgtgccccatttaagaattgcacatagcatgatcaaacatctagcccttgagaaagcagatctttgaatcatgttggataagtaaaactgcagtacaacagagaccgggccagtggcaaagccctttgactgccttgcatatacagcaacgctctcaaaggcctttaaaagtatgcttcggtcttccttgagaacttcatatgaatggagaaatttatatgtacacccacagtatgttcagttttttggtaatgcctagctttgatacagaagtactgtactagtgtgtctgtaaattctacatttctctgtaataataaaaagtaccttgtactttatcccaactaagagataattaaaacataatgaaggcaaaacaaaaaaaaaaaaaaaa

SEQ ID NO: 324 - DNA, 3329 bp, Xenopus laevis
agcctaaagaccaagcagagaggatatgtctgcagctctgatctaattgcattttaaagagggcaactctggaacttgctgtcctaaatccatgtgtagcagccagctgctgttgaggttaggtccagatgataccccagggtaggataattttggcccgtgctgcgggctactggaagcccttttttaaagggagattccttatagtcaccaacacagttagctgtggactgttgctaggcattggagactgcgtccagcagacccgggaggtgaggagagacccagaaagaaaacgagactggctgcgtacaggtagaatgttcgctattggctgctccatgggtcccataatgcacttctggtattcttggcttgatcgagccttccctggaagaggaatcactattgtgatgaggaaagtgctaattgaccaacttgtagcctctcctgtactgggcatatggtacttccttggctgattggactgtgtggccagcagcacagatgatcaacttttacttcctgtcaccaaaatacagagtcatgtatatcaatgtgattacagtgggctgggatacttatctttcctacttgaaacacaggaaggaagaatgtgttgcggacactgccacaggcgcttcaagttttgggaccttggatgaacttgacagctgctccacaccaccaaagactcttgatgaaaatgggcaaccttaaaaaaataatattattagtaaatataatgctgatgtaatggctagattgttctgctagagcatggccctgtcatcagaggtgtgccccacacatacattcttataagccagtggttcttaaactaaggggctggccccactttggggacctagagcaattgctggaaacggtcagtaataggccaattgcagggagaatgcttattttctctcctggatagcctgtataatgtgttagatatccttggaaccagagttggacaaccgatacagtaataaatatatatatttttaattgatgtacccttcttattggttcatggggctcagactaaaccctagaccaagaaagatcaaataccattgccttaagcacttcaattaacacgttaactgtatcatttcaaacaccagggcacttgtatgagctgctctccaaatctgggttcttttaattcatacataacataaggggatcaacattttacttgaatttattacacttgccaaacttgctgaagtagtagactttcactcaggcaatttttttatgtacttaatcaagtaggcacaaggacaagttaagaggtcagccttgacagaacatgtggtgcttaatatatgcttttttttcaagaaattatatgaacattcttatccttacggattcttcagtgccaaaaagggtgtcctatcatgattccaattctatatcctttgctataatgaaattatgtatgtaaagtttatttctgtaaaacaagggttcagtcatttaccaatcaatgaatggggaattaatcgatttcaagctgcacaaggctttctgttttcactactgctgcactgttagtgggatgacttacttagttatttcagttgggcctggttaaaggtgcaatatcgtgccatatccagaataaaaaaaatatttgctgttgttttcaggtagaactaaaaagtactgttaatttagaaaactatgacatcacatttgtgcttctatggagaagtatttcctggtttctgtcactggcctaaaaaagccatattttatttatgacactgagtaaagctgtatgcttagagcacttgtggcatcattgtaacaatcacaatgagaggtacatttaggctagatacatcttcttgtcagagttggaaatagcctgcatggggacattagtttgaggtggtggcccctggacacctttcttcaatattgcttgttgtagtctatagcagttatgctcagcctaaactgtgccttaggaaatgttgcgtgtagcactctatcatacatctggtatacagttgctataggctctgtttttcttgagccttactatactgtcacttggggaggcctttgtcaattcagctattagagtggaacaggtaagagtttttattaaggcagaaaaacgtgtgagtgtatatttatatgtatatatatatatatatatatatatatatatatatatatatatatatatatatatatatatatatatatatatatatatatatatatatatatatatatatatatatatatatatatatatatatatatatatatatatatatatatatatatatatatatatatatatatatatatatatatatatatatatatatatatatatatatatatatatatatatatatatatatatatatatatatatatatatatatatatatatatatatatatatatatatatatatatatatatatatatatatatatatatatatatatatatatatatatatatatatatatatatatatatatatatatatatatatatatatatatatatatatatatatatatatatatatatatatatatatatatatatatatatatatatatatatatatatatatatatatatatatatatatatatatatatatatatatatatatatatatatatatatatatatatatatatatatatatatatatatatatatatatatatatatatatatatatatatatatatatatatatatatatatatatatatatatatatatatatatatatatatatatatatatatatatatatatatatatatatatattcaagtccctctatgtaaaaacaaaatgaatcataaagctatagtatcctaaaactctcatacaggtatgggatctggaaacccattatccaaaaagctctgaattacagaatggctgcctcccatagactcccattttatccaaataatccacatttctaaaaaaaaaaattttttgtttgtaataatagtaccttgtacttgatccaaactaagatacaattaatctttattggaagcaaaaccagcctattgggtttatttaatgtttatatgatttactagtagatttaaggtatgaagatccaaattatggaaagatctatctagaaccccaggtcctgagcattctggataacaggtcccatacctgtctcttgtaaaaagaatatactgtaattttggttataattatacaataatattttttacaaggtgaaccatgttaaatttattttcgattaaaatatctattggaaacataaaaaaaaaaaaaaa

SEQ ID NO: 325 - DNA, 2959 bp, Xenopus laevis
attaagtgtcggttccatctttcagaagttttactccgctctagcagttcccagttaaatttatgtatggctcaactaaagttgcagcctctggcatcctcctttctctattttggactggtaacgtttatccttttccttcagagtttgcatgtcgacgctggtgcaagcaacagtccccaaaatacagtacagaacgacacctgctcaggatcatatgaatgcaaggagggtgtcattttgccaatatggtacccggaaaatccatctatgggggataaaattgccagagtcattgtgtactttgtggcaatgatttacatgtttcttggcgtgtccattattgcggaccgctttatggcatccattgaagttataacatcacaggaaagagagattgtcgtaaaaaagcccaatggagaaacttctactaccaccattcggatatggaacgagactgtctctaacttgactcttatggctcttggctcatctgcacctgaaatcctcttgtctttgattgaggtatgtggccatggatttcttgcgggtgatcttggcccatctacaatagttgggagtgcagcttttaacatgttcattattatggcactctgtgtctatgtcataccagatggagaaattagaaaagtaaagcacctcagagtgttttttgtcaccgcagcatggagcatttttgcatatatatggttatacatgatacttgccgtgttctctccaggagtagtgcaagtctgggaaggtttgctcactttattttttttcccagtgtgcgttgttctggcatgggtggccgataaacgccttctgttctacaaatatatgcacaaaaggtatcgtactgataaacacagggcaatcatgattgagacagaggcagagcatccaaaagggattgaaatggatggcaagttgatgaattctcattttctggatgggcatctcttgaacatggatgctaaagaagtggatgaatcacgaagagatatgattaggatccttaaggagttaaaacagaagcatcctgagaaggacttggaccagttagtagaaatggcgaactattatgctttgtctcatcagcagaaaagccgagctttttaccgtatacaagccactagaatgatgacaggagcaggtaatattttgaaaaaacatgctgccgagcagtccaagagaagttccagcttgcaagatatctgtctggatgaatctgaggagtttgtgtcaaagatttattttgatccatgctcctatcagtgtcttgagaactgtggtgctgttctcttaacggtggtgaggaagggtggtgacatttcaaaaacagtttttgttgactacaagacagaagatggctcagccaatgcaggtgctgattatgagttcacagaggggcagttggtcttcaagtctggggaaatccaaaaggagttttcagttgggattattgatgatgacatatttgaagaagatgagcatttctttgtaaggcttagcaatatacgaatagcaggggcaccagagccagcagagcccaatagctttagttatccaaaagctgtccttgtctcgccccatgttgcttcaattactatcttggatgatgaccacgctggcatatttacttttgaatgtgacataatacgtgttagtgaaagcattggtgtgatggaggttaaagttcttaggacatcaggtgctagaggaacagtcatagtgccctataggacagttgaggggacagccaaaggaggaggagaagattatgaagatacttatggagaactggaattcaagaatgatgaaactgtgtaagtgatttaccatttttattattcagtaatgtattcagtaatgtattattcagcaatgtaattgtgacaactgaacttgacttcggatctgtggcttccatttctccttattcagtttttcactttaaggtatgatcttgttgggctttctgtcttatttttaaaccatagtatttgatcatagatagactgatgctttttccagtcacctagagtgctagttatatggaatgtataataatgtagaatactatgagcttgtcggttagttgcttcttataatgaaaatctattcataaatgcaagtagttttgatcgatgaagctaaaaagctgtaagtagcagcactgatgatattaaatctgtcacttaaggaggaaaccatcagggttttttcctttaaaggagaaggaaaggttaaaactaagtaagtcctatcacaaaggtctatataaatacaccagtaaacccccaaagtaatgctgctctgagtcctctgtcaaaagaaacagcacatttctttccttctattgtgtactcatgggcttctgtatcagacttcctgccttcagcttaaacctcattgccctgggcaagagcatgctcagtttgctcctcttccccaccccctcccttctagactgtaatctgagcccagagcagggagagactcaggcaggaagtgatgtcacaccaagctaatatggcagctgctatcctaaacaaacagagagtttctagagctttttactcaggtatggtaaaacattctacagaataaatatatcattctagcttgcactattgcagctaatctattggcaataaaatgcctccatagctttccttctcctttaacaatggcactagaactgggtgtttcatgagagttatccagtgtcagccatggcttattatacaataaccctgtttatcatacgtaaatcttttttatttattattttatttttattgtaattatgcttaaaaactataggaaaaaagcaaaagtacattgaaaaaaaaaaaaaaaaaaaaaaaaaaaaaaaaaaaaaaaaaaaaaaaaaaaaaaaaaaaaaaaaaaaaaaaaaaaaaaaaaaaaaaaaaaaaaaaaaaaaaaaaaa

SEQ ID NO: 326 - DNA, 8059 bp, Xenopus laevis
tcaatcttcgtcctgctagcggctggggagacactgggaccggcaggttgctcctgtgaaatctgacggcaaatcgcccccaccccctcccgtctcctcttcaccatcctccccttctatttggaaacaaaagccttgcagcatgggaagtgacactggctcccagacatgctgacagtcggagggactcggcacctgggccatgcacaaccgagcactaccagaggtccagttttactttagcacgcttgcacggacacaagggctttttgtattgtgctttttagcagaagagactgattagtgcacctgaagtatggcaactatagaaagtggaacgactataaccagccgcctgaaaaacctgctgcgctctccctccatcaagctgaggagacacaaagctggcaccaagaaagaagacctaagcagcaaggtgacgctagagaaggttcttggtatcacagtatctgctggaagaggactatcatgcgacccaaagactggccttgttgcttatccagccgggtgtgttgtcgtgttgttgaatcctcggaagaacaaacagcagcacatcctgaatagctcaagaaaaaccatcaccgctcttgccttttccccagatgggaagttcttggtcacaggagagagtgggcacatgcctgcagtgcgggtatgggacgtggcggagcgcacccaggtagccgaactccaggaacacaaatatggtgtggcctgtgtggccttctctccaacctccaaatacattgtatcagtcgggtaccagcatgatatgattgtcaatgtgtggtcatggaagaaaaatgtagttgtggctgcaaacaaggtttccagcaaggtgacagcggtctcgttctctgaagacagcagttactttgtgactgctggcaaccgtcatgtcaaattttggtacctcgatgaagcaaagtcctccaaggtgaactcaaccattcccctgctgggacgatcgggcttattgggcgagctcaggaacaattttttcactgacgtggcatgtggcaagagcaagaaatcaagcagcactttctgtattacttcctcagggcttttgtgtgaatttaatgaccagaggctactggacaaatgggtggagctcaggacaactgtggcaaactgcatcctggtaaaccatgactatatcttttgtggctgcgctgatggcaccgtacggatctttaaccccaacaacttgcactttctcagcactatgccaaaaccccactgccttggtgtggacattgctacagttaccgaagcaagtcgacttttctccagtgctgctgatgctaagtaccctgataccattgctatgactttcgaccctaccaaccagtggctctcctgcgtgtacaatgatcacagcctttatgtttgggatgtcaaggatcttaagaaagtggggaaggtttactcttcattgtaccattcctcatgtgtatggagcattgagatctacccagagattaaagatagcaaccaggcctgccttccacccaactccttcattacatgctcctctgacagtacaatacgtctatggaacatggagacttccaacatacatggcactgcattgcatcggaatatcttaagtaatgacttgatgaaaattatcctgattgatgataacacccaggccttactggacacagagtacaactctgctggtctaggggacaaggcagatcaccaagctctggataccaaagttggcattcgctctgtgtgtgtgagtccaaatgggcagcatttggcatctggagaccgaactgggacactcagggtgcatgagctgcaaagcatgacagaactcctcaaagtagaagcacatgactctgagatcctttgtttggagtattccaagccagatacaggacttaatctgttggcttctgccagccgtgacagactcatccacgtgctggatgcctctaaggattacagccttcagcagacgttggatgatcactcttcgtcgatcactgctgtgaagtttgctgcaaatgatggcaaagtacaaatgatcagctgtggcgcagataaaagcatctactttcgcactgctgacaaggtaggggatgcggcggttcactttactcgtactcatcatattgtacggaaaactactctgtatgacatggatgttgatcctagcctgaaatatgctgccataggctgtcaagaccggaatataaggatctttaacattagcagtggaaagcaaaaaaagttgtacaaaggatcacaaagtgaggatgggacattaattaaagttcaaacagacccttcaggattgtatattgccacaagctgttctgacaagaacttgtccatctttgatttctactctggagagtgtgtggccaccatgtttgggcactcagaggttgtaaccggaatgaaatttaccaatgactgcaaacacttgatatctgtgtctggcgacagctgcgttttcatctggaggctgagctcagagatgaccattaatatgcgccaaagattggctgaagtcagacagcgtggcaagcaagtggagatgtctgcaactcacaaaactcaaaatgcaaggcgagagaccattgccgttatgtctacagcccctgtaatgtcatcagacagtgataaagaaggggttgaagatggaagtgacgaagacacggcagggtctgataaggcttccagtgcctccagttcttttgggagaagcaattcttattgggagatggcaaggggtacaaacacatcttcagaaagatccaactgcctgagtaagatgcccagacaacgtgtccgttggtcccaacctgctgggaacattgagatgactgttaagtccatgcttgatctaagacaactggattcctttgccccgtgcgatgacatcattggcttccagcctagcgaagggctgggaacagagtttgtggttgcggataattcaagcatccaggcaccttttggtcccataggcagtcggtctcgccctagagttatccggcttatgtcctgtgaggaaaccatgttcaagcaggatgtggagacaccagaaggcaaagaatgtaccatattccctgaaatggaggaggatgagtctttggaaagatgcggtggatttgaggtgaaaggtttgccactgcggagttaccatgacaatgtttgtcaagagaagcacagccctgacagtgcctgttctgtggattatagcagtcgcttgtctagccctgagcaccccaatgaagattctgaaagcacagagcccttgagtgtagatgcaaactcttctgatctggaagagcaggtggaagctgaggatctggagccaaacagcccagtgatggatggggagatcccacagacaccagaccaggagaagttccttaagcagcattttggaaacctctctgctggcaatattccaggtggacctctactaacttcagagaggaatgacttctccagcatttcctcccgcttccttgcaatggccgcacccagcaaaaatcaaccagttgaatccttgatgtttgattcagagttcagccctgcattatttcagccttcaatggagcatcccgcactgatcaatagaaccgaaagtcagcccaaaagtgcaattacgactgatcacgatttcaccagccctcaaaaactcaactactttcaaaggaagagaaagcaccttcaagaatatgagcatataggtaaaggcgggcctttttcctcagtgatgcagatacggaaaacgcaatcagttcatgatcttgtaaatgaaggtaataaaacaaccgccaatggaggtattgtgaaaatgcgttcccaagtgcagacagctgccgaaagagaagagaaggccattcgccgacgaactttgccatccactctaataaaagtggaaaatctggcctctggtacaccccattcaaaagatggcaaattggctaaaggaagatcctacatgaatccaaccacaagctccatggctaaaatttctcggagtatgtctgtgggagaaaacctaaatattgaagagaatcaggacgcttctttgagttttgatggaaaaggcaattgtgaacctgagataggggctatccccagttttgtagagactgagaagaacaggcaaactgctaaagagactgtcatcatcaaaccacatttgcagcctgtagcaaactgttcctcaacaaagacttttcagaccaagaatcgagcacacctcactctagatattgctaaaccattgccagaccgaccccttctgtcctttaataaaggcaaaggggcactggagatggagtctccaaggtcaccagcaagcagctgtaaagtcaaaagttccttctcagagttcacttgtaggaatgacaaccaggcgtctggtgctttagaaaaaaccagcccgtcagaggattatggctgcagtaaaagcaaagaaaatgatgttaaggcaaactctaaaccaaatgtatatcaagaacgagtagagttattttctgacatgttgaaacccattcacagaggcagagcttctaccattggccatactccagaccatcactcagggctttgtcctgaagttgaacccatcagacctagatctccctctcttaatgcagcgccaacacacaattcagcatcatctgtgagttttgagcagtgtgaactaattgcttcggagctgcaggacagtctccagaaggctctgagtttgtacagatctgtgaccactgctgatccttcagctaacatggagcgctgcaagattgcaggtctattgactgaaacctttggtatggtgaagcgagagcttgatttcttgaaagaaggaaatagcagccctggaacagcaatgacaccccaggatgagactggctctgacttcacagcacccaacttacatgaagagcatgggacacgtcgcctgggtgatgacaaaacacttgctcttctccagcaatactctgaactcttgctgcaagctgtggaaaagaggatggacaagaagctctaagcaggagcagcaagtcctcggagtgcacatctctgctggagccctgcgagccaaaacggactcttgactaaattaaacactaaatccatgttgatgattttattctgttacagcaatctcttcaaaccagcagtacttaccacctagcagactggccctgcttcggtcaggactgatatttgttctgtttctgctcccagttgctcgcagatgcacagaacattttttttttttttttaatttaatctgtgatcctaataacaaaagcatttatcaagtgttttttattcgttgctatatatatttttaaattattgatttagctttaactgtttgtgttggatatctcggctttttttccctgcagaggcaatgcatttattttcacaagcgcccacactgttggcagggccagatacccgcagctttggcagtgcagggagctttaagaacgctaagtcttggcatctctgtttagggatggtttacattttcttagcattgtattgttgctgctttcttttatatatgtgtatatttgttatttcattgttacagtgtgttattaccctttccacatacctgaggggctgttgcatttctctgacgaccttgtataagatggcggaatccattggtttccttccctttgcttctagagaaacttaactttgtttccatgcagggggtgaggatgtgcaagttggcttatttgatacatttgttattgctgggccaacacgaagtacattaaggctttgccaactaaattccagttatccaaactggtttgcctatccccaagtatcagcatttgttgaacaccagagttttcatactggtctcgaccattttctttattcgcagccagttcatgtttttatgttaaatgacatacaagtattattgcacattttacctgaactccatttctgattcttccaaacagttaagtgagaagtcagaattttgttgccccctgtcttgtattcataatgcttacattatatatatatatatatatatatatatatatatgtgtatgtgtgtgtatgtgtatatatatatatatatatatatatatatatatatatatatatatatgtatatatatgtatatatgtatatatatatatatatatatatatgtttatactgcttgtgctgtggtatggtaacagttagtgcatgggctttgcttgaagagctgagaaacaagcttaccagttccatgttaggaaatgggtaacccctttgcctttggaacctgtaaactttttttttaaatgtttttatagagctttttcgcagcctcaggtgatcgatcaagccaaggacttggacaatcccttttaaaaaaaatataaagtagggtaaaaacttgctgtaacatagtttgtgtgatctatgcagacaaaacgcacctttattatccaagattatttagtaagtggttttttaagtggtgctttttatattttatttgaataagaatgcaatgttatatatgagaggatggatttactttggaatgaatacaattacttgaacaggcgatagtttcattttaagaaagtaatgaggctggtcctctaatagaactttgatttaaggttaaccctgcacctttaacccttggctgttctaatcaaggaaagagttaataacatgggtgtatattggcaggttactgatttaataggctaccagtaggttagaaagatgtgccctatcgctttcaatacaagtttgccctaaacctaatctccagcttgttgtttgccctacttttatttttcaatattattggctgttctctgttctgctgtagctgctcgccatttacattttaactgttccatttcagcaagcaacaagtttacgactgacctgatttttcaggtaattctgagccatttttcttgtaaatagtaaatctgccctgtcatacatagaaacggaatgaggtcagagtgttatttggggcagtcaggtttttatatcctttttttacagtgcggtgtaggccactgacctattgcaatgcaatcttttggcttccactgcctgaggaactagtgatgagacatccatgttcttaataataacaacgtataataataataacaacttcttaatgagtggaggcaaatatgcggagaacggttgctcagtgtacaccataagcccttcatacaaataaggaaaacagtcacttttaaatcaagcatgatgacttatgaagacttacattatgggaagcaatgtcacgtgtttaagtaacactgggtagatcatctctggaattgctttacaataggttgcaggcctgtggagattgattttttttttttttttctttctttttttgatattgaagaactggccattgtaaatagtgtaagataaaccatttaaagatctattgcttggctcaaagatgggtttttgaagtcattggtgcatgaagaagagatgcatgctgacttcctctagagaatgcttatgttgtaagcaagctgcatgccatgcgtttgtcataagtgcaaccaatatactccaccttgcaaccatttgaccttcactgctctattatatgtcctttgtctttaacggtcaattcaaagtcacatctgtagatgccacagagtgaagcacctgactcctgaaaaaatattttgatacgttacctttgttacaggaaaggatttaaaaacacgaaaaaactttttctaaccatttgaagcaactctttttatgtttgtgtttttgcactgtgatctgccctctccacatgtctctgggaggagaggctcttttttattcctttgtactccatgtcttaatttcaataaaagtgtggctctttttgagttttattgatataaaaaaaaaaaaaaaaaaaaaaaaaaaaaaaaaaaaaaaaaaaaaaaaaaaaaaaaaaaaaaaaaaaaaaaaaaaaaaaaaaaaaaaaaaaaaaaaaaaaaaaaaaaaaaaaaa

SEQ ID NO: 327 - DNA, 1811 bp, Xenopus laevis
cccacgcgtccgccatagtcattatttagccagacatttgcaccctgtcagctgccttttgctctttgcagtatggatacggacatgaataaagaagttcagccaccctatttgctgttgtgaggaacaagggagtgtgtggaacagtctctcctgctgtgaatgctgcttccttgtactgaacaaaaggactgagtgatacaaaggatgacttgcagtacaaattgttttcttaggctattcttatgcctagatatcctacagggagcttgtggaatatcagaaccgtcgtatattgccaaaagtgaagaccgattattcaaatacttatttcaacagcaagaataccaaagatgggttcgcccagttgaacacttgaacgatacagtgacagtcaagtttggccttgccattacacaacttgtggatgtagatgaaaaaaatcaactaatgaccacaaatgtttggttgaagcaggaatgggttgatgttaagctgagatgggatcccaatgaatttgctggaataacatcaattcgtgtcccatcggattctatttggattcccgatattgttctctatgacaatgctgatggacgcttcgaagggtctgttacaaaagctgtggtgagatatgatggcaccataaactggactccaccagcaaattacaaaagctcttgtaccatagatgtgacatttttcccttttgatcttcaaaactgctccatgaagtttggttcatggacctatgatggctctcaggttgacatcattcttgaagattatcatgtggacaagagagacttctttgacaatggagaatgggaaattgtcaatgcaactggaaacagaggaaatcgaacagatgggtgctgcttttatccatttattacgtattcattcattataaaacgcttgcctcttttttacacactttttctaattgttccctgtattggactttcttttctgacaatacttgttttttatctgccttcaaatgcgggtgaaaaaatttctctttgtacctcagtccttgtatccctgaccgtttttctacttgtgatagaagaaattataccttcttcatcaaaggtcatacctcttattggagagtacttggtgttcacaatgatatttgtaacattatcgattgtgctaacagtttttgccataaacattcataatcgttctactgcaacacacaatgctatggcaccctgggttcgcaaaatatttcttcaccaacttcctaaattgctatgcatgagaagtcacgtggatcgatacttcactagagaggaagaaactggaaaggcgaaaggaccagagtcatctcagaataccttagaggcagccttggattctattcgttatattacacgacatgtaatgaaggaacacaaagttcgagaggtggttgaagactggaagtatgtagcgcaagtgctggatagaatgtttttatggacatttcttctggtttcagtaatcggctcacttttcctatttatacccgtcatacataaatgggccaatattattgtgcctgtacacattggaaacatgtatggagacaaaaacacataagcataaacaaatgccatgtttgtgtatgataaatttgctgctttgcccaatatttgatgctttaagagaacctatatttttatttatttaattaactttattacttaagctatttcctaaagctccagtatgttatttgttcgagctgattccttttatatgtttacatttttattttgtaaataaaaataaaaaaaaaaaaaaaaaaaaaaaaaaaa

SEQ ID NO: 328 - DNA, 3172 bp, Xenopus laevis
atggctgggggttatcccaaattgttcagtattcctccagctctgagaggacagctgagagacaatgacagccaacactggagagccgtataaaagacattcaaatgaaagccctgtcgacaggaatattaacgtaaacgcaattcaatcagacaagtttttatctcttcttttgagcatggttcctgttgtgtgccagacgggtcaagaagagagactgaagaaggtcaatggattgacacccattggttatggttttaacattcgaactgaccagcacttggaattccataatttgtcagaaccaaattatcttggaaatggcctccattgttcaagcctttgcagtacaaattatgactttgatggttatgattactgtgatggaatcaatgcatctgaaactgatgctatgctgcaggacagcaggtcatctgctgatggagataaagatgcccttgtcgaggggagcaaaaaacagactaaagaatctagcattgccatggcattgcaaatacttgtgccatttttactggctgggtttggaactgtgtcagctggcatggttttggacattgtccagcactgggatgtattcaaaaatcttacagaagtctttatcctggttcctgcgctacttggtcttaaggggaacttagaaatgacattggcatccaggctttcaactgcagttaatgttggaaagatggactcgcctatagagaagtggaacctaatcattggcaacttagctttaaagcaggtacaagcaactgtggttggctttctggcagccgtgtttgctgttatattgggctggatcccagatggtaaataccagttagatcatgcaatccttctatgctccagtagtgtagctactgcgtttattgcatctcttctgcaaggcataatcatggttggagtcattgtaggatcgaaaaagactggaataaatccagacaatgttgctacacctatagcagccagctttggggatctgatcactctggctatattggcttggataagtcagggactttacaattgccttggttcctacgcatttgtatccccattagttggggttttctttttagcaatgacaccaatatggattgttatagcatctaaacatccagccacaagaactgttcttcattccggctgggagccggtcattaccgcaatgcttattagcagcattggtggccttatactagacactactgtgtctgatccaaatcttgttgggattgttgtctatactccagtgataaatggcattggtggtaatttggtggccattcaggcaagccgaatatctacatatttgcatttatacagcatccctggggagctgccagaagatgccaaaggttgttaccacccttgcaggaccttctgtggaacaggagttaacaataaatcggctcaagttctactgtcgctcgtgatcccaggccatttaattttcctgtacaccatctatttaatgaagagtggtcacacatccctgacacccatctttgtagctgtttatttattagcagctttgctacaggtatttgctctgctgtggatcgcagactggatggtgcatcacatttggaggaaaggaaaagatcccgacagtttctccattccttatcttacagccctgggggatctgttgggcacggcattgctcgccatcagtttccatattctttggattataggggacagagatggagacgttggagactgagacgtgtagtgccaaaccaaccttctcctgactgtgaccaaatctgccaaacccaaacaaaatgtcacattaaggatgagtggagtgcatcttctcggcacaagcaaacataagggtccatggcaaaaatgttctttttagcaggggagattgaattgaaatgcacaaatggcacactgcttgtacattttattaaacattggagaggacaacatgaatttagctgattgtctttgaaaccacaattaatatgcaccttacattaaagggaaaagggtatatttctggctaaattattacaatatgtcaatatattaacatggggaaaaatggaggtattgaatttttttttttttaacttaatttaattttacttatgttaagacatttctatgtatcatttcttccatgagcagttcattcttatttgcagatgtagcagcacctatgtgaatgggaaagaggctggtttcagtttatattgagatgtagcagcacctatgtgaatgggaaagaggctggtttcagtttgaagttgtctgtaagttccacaaaagtctattatttaactaagggctccttgctttaaatttgtccacacatgaaccaaccagcaagtccactgcaatcaatcaaacaggccacatgtaaagactcagtgatcagattgatgctggtgggcacttgcactttgggcaaataacaatgctttgactttttgtaacataggtgacttgccattaaagtgtttctaggttctgcttatcatgtactatatatttgttttttattgtgatgtaataaaggggtagttcaacctataattaaattttagtagaatgtgatcatctcagatcatttgcaaatggtcattttatttttatttttttaagtcaacttttatccagcaggtcaactgttttcagtcttagttgttacctagttgctagggtccaatttaccctagcaacgagattgtgttttaaatagactggaaaattaatttaagagtttctgtatagaaagtaacaataataaaaccttatagggtacaatgtttgactgcagggatcaatgacccccatcagccagataatgtttaaaattcaaaagaagcaggaagggacatttttttccagtctttgaactaagacaattaaaaattatgaagaatagagctttctataacacactaaaagttaactcagcggtgaactacccctttaagcaaatctgtaaatgaaagctgtcctgtttctgttcttttttgcaattgttgctgggtacgtaaagggacagtatacaccccttttcaacattaactaaatgaatagagcttgtgctggacatactttttgcctattatcttaattaataaatatggtttttgctacatttaccagtaaaaaaaaaaaaaaaaaa

SEQ ID NO: 329 - DNA, 3352 bp, Xenopus laevis
ggctgggagtggagtaggaggagcagaggccggtgggagtgggataggagggtccgggcaggtcccaggccgggaggatctggagtcccggtgccagagttagggctgcaatggaaaagcacattatgggcacctgatatcggggagactgagctggggacgcgcgactcacactcacaggaccatggggcacagggagggaatggagagaagcgcacggagtcgggttctactggcggtatcgctgctttgctgcctggtcccgagtctgggaggtccaaatgtgtgtacaacccggagtgcaacttcagcatcctgccacgagtgccttcttacacaccctcagtgtgcctggtgctcccaggaggagtttggtggctccaggactgtaacttcccgctgtgactttgtgcacaatctcatcagcagaggctgcaagaaagacttcatcgagggccccgggagtagcgtcactataaccaagaatctccccctcagtacaaaggagtccagctcctcacaaacaaacttcatccaggttgcacctcagaagatatccctgtctctgcgcccaggggctgcagcttcatttaaggtccatgtgcggcaggtagaagactacccggtggatctctattacctgatggatttatctctttccatgaaagatgatctggataccatccggaatctaggaaccaaactagctgcagagatgaagaaactgaccagtaactttcgcttgggttttggaacctttgtggataagaacatgtccccttactcttacactgcccctaaatatcaaaacaacccttgcactggatacaaatacttccctgtttgtgttccctcatttggattccgccaccttctctcactcactgacaaggcaaacagctttaacgccgaggtgcagaagcagcgagtgtcacgcaatagggatgccccagaaggagcttttgacgccatcctgcaggcagctgtatgtggggatcggattggctggaggaaagaggcatctcacttacttttaatcaccactgacgatgttccacatgttgcgctggatgggaaactggctggtgtggtgcagcctcatgatgggcaatgtcaccttaatgaaaataatgagtacagcgcttctgataagctggattatccatcgcttgcgctacttggggacaaactgtctgagaacaacattaacctcatatttgctgtcaccaaaagtaattatgtgctgtacaagaatttcacggcactgattcctggtacgacagctgagatcctggaccaggattcccagaacatcattcagctaatcgtcagtgcatacaataatatccgctccaaggtggaactaatggtgtcggacagccctgaggacctcggcctgagttttactgccacatgtcaggatggtgtatcctacccaggggtcaagaaatgtggagaactgaaaattggtgacactgtgtcatttgaggtgtcagttgaggccagaaactgccacccccctggcacagagcacacgttcacaatcaagcctgtgggattccgtgacacgctggaggtgactgtgacctataactgcagttgcagctgcacccaacaggtggagacagcgagcagcaaatgcagcagcaatgggacctacacctgtggtgtttgtgactgtgacactggtttcctgggggcccggtgtgagtgcggagaggaagagatcagcagtgacgtgtcccagaatacctgcagggaggccgagggcaagacagtgtgcaatggccgtggcaggtgcctgtgtggcctgtgtgtgtgctacgagagtgaatttggcatcattagtggctccttctgtcagtgtgatgacttctcttgcgccaggtacaagggcatcctatgctcaggccatggggagtgtgactgtggagagtgcaagtgccacgccggctacattggtgacaactgtaactgcaccatagagaccagcagttgcctctctgatgatggacagatgtgcagcggaaaaggcaactgcgtgtgtgggaggtgtcagtgcattgaaccgggggcttttggagaaacttgcgagaagtgtcccacgtgccctgatgcctgtggaaccaaaagggactgcattgaatgccgactgtaccaaacagggcgactcgctgataaccaaacatgtcagaagctctgcaaggaccagatcatcacagtggaggagctcaacactgacaatccggaggcagccgtatgtatttacaagacagaaagcgactgtgtcatgcgattcacttactcggaggagagtggcagatcagtcctgagggtcctaaaggagccagagtgtgccagtgcccccgataccctcactgtactgctggcggtggtgggcagcatactgctaataggcctcgtactgctggcagtctggaagctgctcgttaccattcatgaccggcgtgaattctctagatttcaaagtgatcgctcgagggcccgatatgagatggcatcgaaccctctgtacaggccggcagtgtccacgcacaacgtagatgagatgtacaacatgctgagcaagtcctataatggtaccacatagggactgggcagaaatggagcaaggcactgacgacctgggagtctggcggggcccagcttatgataaaacccatagaaaagctctgagccagttggggtgatcagaaatttgcacatatatgggctccacgctggcacttctgcactgtcctggcacaacagccaagtcatagactccagccaggattcctactgtttaaccagccggtaccactaatgactggacaatgtacacaatcaagtctgatccagagatcttctactttcccctgaaagccttatggagagaaatgtgcgggggggggggttattgtcggcaaactgttgttttaagccctgctttgggagtggggtaggtacagtatcagtatcagagtttggaaaggagcagaatttctgtgcaatcatgtcttacttgttgaagaatttttataaataagataaaaatttctataaaaatttgctgaattttgtggatttgtgcccaaaatttcctttagattttatattagagatttttaactaattccagtgtgagtgcgactccagatcccataggtatgtttagcccattactgaccctgaggtttaacctcctggggtaatatcagggataactgccctggactgtcatgtttggagggttgttgttttataagataatatttggactttttgacatttttgtaataaccttaaattaataaagaacagaaatcctttaataaaaaaaaaaaaaaaa

SEQ ID NO: 330 - DNA, 2844 bp, Xenopus laevis
ggcaggcactaaagacctacactttaatggcgttgtggggcgtttaggcagcgatcagccactgcgggtttcgtcaagaaaaccgggtttgttgggcgctatggtctgaagctgtataaacgtatcggcccgcggggcgttggatggcagaaatatggaaggtggcggaggagggttgggtggagaacccgggcttttgcagcaaatcctgagtcttagattggtgccgcgggtcggcaatgtgactgactgtcagagggccacgttgtgctccttccctgaaatgtggtatggagttttcctatgggcgcttgtctcttctcttttttttcacatacctgctggattgctagccctattcactctcagacaccacaagtatgggcgctttatgtcagtaggaatcttcctgatgggagttttgggacccatatctgcaggaattttaacaagtgctgcaatagctggagtatacaaagctgctggcaaagagatgatccctttcgaagctcttgtgctgggtgttggtcagactttctgtgttctcatagtttcttttttgcggattttagcaactttgtaaagtaatgtactgccatttgaaccagacatttggcttgggaaccatccataacagccttgctcaacagttataactggacagcaaagcttttattactttggcatctaaaaaaatacctgcctttctgctgtggactagctgaagtgtaatccccacaggatactgaaaatttccctgcattttttgggacaagtttgaacattctcacataaaaagtccaaattagaatttagatcaaattacaaacaagttcaaagagtgttttctgtacataatggacttgtaaggatttctaaagttgtattgcactgcagacttcatgaatatacatttactacaaaatgttatgcttcaggatctctgtcctcgctacacagggtagcccttgctttttttaaatggattttaaaaattccaagagatttttattttttctgggggaaaagtgaaattgattgattgaaaatttttagattttttttttatgttgccattttttgtttctggcttggtctcactgctgctaaaatctatttaaattcacactttttgaagctgaagattactggataggtaactttttgtatattttataccacagagtgttggtgcagagctgtaaaataggggtttgaaaaagttctgtgaaatactatatttcatatcgcactttaactatgcatttctttacaagtacatttttgttacctgtaccacattttaaagtgtgccttctgtaggggcatattgtatatttactagagtacttaaagacaaatacctgttttatccctattggaattagtagtttttaaacagtttttgtatattaaaagaaaaatactttagctactttagttaaatcatttattaaccatgggtaaatttgcatcggtacagtaatgcataagaaatctttttgatgagctgaatttgattttcttattcaccctccctagaccgattaaagactagtgattggttgctatgggttactgtatcagctttcctaacgttttttatccctgggtcctcagatgatattggacgactaatcccagaattcccccttaattttatgttagaggatcaggaaattttaaacagaaactgaactcaagtataaagaactactggaccctgcatccacatgcaaaattttgtgttccgcaatctctatgcattatacttttgtatacaccaagtttacaaaattacatggagtgtaacagctgttaaacctagaactaaagaatttacaccaaatgaaaacaaatatttgtgcttcaatgaacaacacagacacataattgttcctagcaatattgtttaaaggtgaaggaaggtttaatatcacctgggtcgggggtgttccaaaggttaggcacatcccagtgattcaaatcatttacctgataccccagggcagtgttcacggaaaatcattactggtccggaagtacttttgtatgaaaaccatgttgcaatcttctcctgttacccaaatctggaggtttgtgtccagtagagtggcaagctggcattttgcttctatgtttggctcttcagcacaccagaacttagaagaagattaagcagtagaaggtggtagtgattctgcagtagtaccaagaaccaatgcacttttcacaaataacagcaccagcttgggggtattgggtaagtgataaatactgggggttgactaataatttcgtgattattccttgcctttttttttaaaccctcattaatgggaagtaaccaaaattgtgttctgttttttttggcacccaggagttgtggcgttcttgggccaaattatattaaaggcaagatgtcttgcatagtactgatgcatggatcaacatcagcttacatctgatactctccttctctccagaaatcaacctgacccaacagccatccattgcttatatacctgtgccactatgcagcccaataacaaactttggccctctggaaggtgccagcccgaacccacctgaccctcagatcccacaagttttgggctggcccacgctactttctagtacttatgaggacaggaacaaactgcatgttttgatgagattttcttatgcaaactattactgccaatgggaaccttatgttatctgtcgctttagtaaacaactggtcaaatgtactctttagaaagaattaaaaataaaaaatgcaacattctaaataaaaaaaaaaaaaaaaaaaaaaaaaaaaaaaaaaaaaaaaaaaaaaaa

SEQ ID NO: 331 - DNA, 2236 bp, Xenopus laevis
cggcgaggggaataaggtggaaagtttatccgctctgatagattgtcggttctgtttggagtgagcacagcttggagacccggggagcactgcattgtggttccatacagtcgtaaacaaatgcaaacgctagaggagcactgctggagttgctcttgcacccgaggaagagacaagaagggcacaaaggtcagcgcctggctagcccgaagagttggaaaagccatgtcctccttaaactctctcctcagtctggcctacagcacactagccagcagtgaaggtcgtagccttatccagagaagcctggtactctttaccgtgggtgttttccttgcactggtactcaatctacttcagatccaaaggaacgtgactctgtttccagaggaagtcatcgccaccatattttcctcggcttggtgggtccccccatgttgtggaactgcagctgctgttgtagggctgctgtatccctgcatcgacagccgtattggagaaccacataaattcaagcgagaatgggccagcgtgatgaggtgcatagccgtctttgttggaatcaaccatgcgagtgctaaacttgattttgccaataacgtccagctgtctttaacactagcagccttgtctttgggactgtggtggaccttcgatcgttccagaagtggtctgggccttggaattactatcgcctttctcgccactcttataacgcagtttcttgtctacaatggcgtataccagtacacctcaccagacttcctatacattcgatcttggctgccttgtatctttttctctggaggagtaactgtcggcaacataggaagacaattagcaatgggttcttcagaaaagacacacggcgactaaacgggtgtttgcgccattgaacagggagaatgtttgagaccctcataacaatccgcaaccttcacttcagcaatgaaacgtcaatatgaaaactgttgctttgttgcctctcactacatcctatggtgtgccggacagtccatcagatcttacgatttatggcggggaaaaaaatggacgcacctcttccattattaaggtttctgatctccctgcaggacggtggcatttgagaaggttctgtgcagacttctcttcacaacacagtattatatttttggaatggtgatattggggggggtgggaaagactcgtcaaagcttcgaggcgtttgtgtcctgtgaagatttacacatatgggcggatggtgctgataaaagaggagtgaatatgagtttaaataggagcatgttatttatcctaaatttaaaataaggctgcaggtaaaaaaggcaatattagattttcccttataataaaaggcaatgctttagttgctgcgacatatagtaaagatctggctaacgatattcctactgttcaacaaccaagaagggaaatgcttagaggctaatcatataaacgaaactaccagtaggatacgagttttagttattcttgcagcaggtaactggtactctcggggaggcacatttatcaatttcgaattcaagtgagtttttaaaaactcacctaaacccacataaatttgaaattcgaccaatcgaaatttattttaaagaaaaatcgttttttttcaaacagataaagtaaatcgacccaaaaccttgaatttaaaaaactagattcgactttttttatcaaaaaaaaaactagaatgtcaggaaggtggcaggcagctccggattgatccctggacgtctcccattgactcaagcagcaattcggcaggttttgggtggcgtatagtcgaattcgaattcctaaaggaccagagtatgataaatatggatgcaccgaatccaggatttggcctttttcagcaggattcgggcgaatccttgtgcatgtccttgtgtatccttgtgcaagtcctaatttgcatatgtaaattaggtgtgggaagggaaatcatgtgactttttgtcacaaaataagcaagtaaaaaaagttttttccaccttttcctttccctgccctaatttgcatattcaaattaggattaggttcggtattcggtcgaatcctttcatgaaggattcggggattcatctgaatcccaaaaagtggattcgttgcatccctaatgataaatcaggaaaatctaattcgaattttttggaaaactcaaatctaatttgaataactccctagtcaatttttaaaaaaaaaaaaaaaa

SEQ ID NO: 332 - DNA, 3004 bp, Xenopus laevis
cggaagtacgggcaggaaaaatcccggagagtaatagaagggcagctgtcagctgaaggagccgccatgcagaaacaaattcctcagatggttgacccgaccttagcagaaatgggaaagaatctggacgaagcaatgaaaatattggaagataatcagaggccatctgaggaagagaaagatggaaagaaatacacaagaaaggatattcctggaccacttcaaggaagtggtcaaaacatggtgagcgttttgcagttagttcagaatctcatgcatgacgatgaggaggagcagtccccatcattacgaagaatccagaatgttggtgagcaaggtcacatggccctcctgggacacagtttggctgcttatatatctgtacttgacagagagcaccttagaaaactcaccaccagaatcctttcagacacaacactatggctctgcaggctcttcagatatgataacggttctgcctactatcatgaagatgatcgagagggacttcttaaagtgtgcaggcttgttatccattcacgctatgaggattacacaacggatggattcaatgtcttatacaacaaactgcctgtcatctacatcagcgctgcctccagacctgggctgggccagtctgtctgtaaccagctgggccttccgctctcctgtttatgccgtgtgccttgcaataccatgtttggatcccagcatgaaatggatgtggccttactggaccgacttataaaagatgacatccagtctggaaaatgccctctacttttagtggccaacgcaggtactccaggagcaggtcacacagacaaactgggccgactgaaggaactttgtgaccagtacaatatatggctgcatgtagagggagtcaatttggcaacactggctttaggttacgtcagttcttctgttttggctgccaccaagtgcgacagcatgacccttacactgggcccgtggcttggtctccctgctgttcctgctgttacattgtatcgacatgaggatccctccctgtctcttgctgccggcctcacatccagtcagcctgttgaaaagctccgtgctctgcctctgtggttatctttgcagtatcttggacacagtggcattgtagagcggataaaacatgcatctcaactgagtcagaaactactggaaaatcttaagaacctgagtccagttaagactccggtggagaatgatggcagctcccctgtggtggtgttccgattcgtttatgaaggttgcaaatcagactcgactttaaacttgagcaccatagaaagagacagcgatgctctgaatcagtggctaggggatcagctggctgctcttgttccttccagcggagtggacatagtagaactggaagatgaaggcacgtgcgtgcgctttaatccactaatgacctgtgcagtcttaggaactaccgctgaagatgttgagcagctggtcgcctgcctcagaatgaagatcccagtccttgagaatacactcagactcaaggaagaattcagacaagaggtagaaaggatagcaggactgtcttacatcaatgactacagctgggccggacttggtgttttaaggtatgaacagttcagcgaggaacaggatgctgccaagagagaagccgatctggaaaagattactgttgctcttctgaagaagctcaatgagctggaaacagatctgacattttgttcagggccagaatttggtgcagaaaagaactgtatctacatcggaatggcatcagaggacctggatgtttcagaattggtagaaaccattacagccatgggcagagaaattgaggaaaattcaaggctgctggaaaacatgacagaagttgtcagaaagggcattttggaagcagaagtgcagcttaacaaggccaacgaggaaaggcttttggaggagggtgtcctacggcagattccattagtgggatcaatgctaaattggctttcgcctgtccaagccacaccaaagggaagaacattcaatttgacagcaggatctctggagaccacagaaatgacttacatatctaaagcacaaacaactggattgacgccacctccaactccaacatccgcacatggaaaaagacaagcaggtcagaagctgtttaaaagactatcgagaaattctgatgcaatgagtgagaccagctccatcagtcacttggaagaagtagagagccttgaagccctgccaatgccagaatatgattcttcagcagcagaaaactctgcaatgggagaaccgtttgcaacagctgagcaatcctcaacgccttccattgttcccaccgaaacctccagcgagggatcccaggaacccagcattcccagcgcaaacacagcggaatcagatagtctaagataaaacgaggtctgacaatgacccaacttaaacgccagggtgtgtaacccgtttaaaatgggaacggtgcgactggagtctacagtaaagactactgtactaaattattaatctgcacaaataatcttaggctttcttgtatggcacagtaagcttggccaacgttactgctgctattaaacaaatagtaattcaacttctctgccagttcttgcactaccaagtatgttcttgatcattctgtaatcaaacctcttttttttctcatttcggttattggtttgggtagagcttccatttaccaccagacgttgttatttaacttaatgatcgtattatatataatgtaaaattgatttgtgtgttctggtttgtacagcttggtgccttgaaggaaaagtcccacccagtaatggattttgtttgtacaggtgtaggatccgtcatccagaaagttccaaattacggaatgaacatctcccatagactccattataatcaaataatccaaatttttaaaaaggattcactttttctctgtaacaataaaacagtatcttgtacttgatccaaaaaaaaaaaaaaaaaaaaa

SEQ ID NO: 333 - DNA, 1866 bp, Xenopus laevis
actccttctagttctttctagggtgtctgtctgagctactcggtacaacgtgtcttcttcattatggaccagcggaaagtgcgggagctgcaggagttcgtgcggttgtgtcagagtaacccagacattttgcactgccccgagttcaagttctttgcggactggctcattagcatgggggcttcagttccagctcctacaaacaaagaaccacctacacataccaagaaggagacaccagtgaaggaagagagaacaccctcgcctccccccaaaccagagagtgaggagagtgatattgagattgataacgagggagtggttcctggagatgatgatgaaccacaagagatgggagatgaatctgtagaggttacggaagaaatgatggatcaggccaatgaaaagaaagtagaagcaattaatgctttgggagaaggtgagcttgaaaaggccattgaactgtttactgaagccataaaactgaacccacggatcgcaattttatatgcaaaaagagcaagtgtgtatgttaagctacagaagccaaacgcagcaatccgtgactgtgaccgagcaatagccattaatcctgattcagcacagccatacaagtggagggggaaagcacacagacttctaggacactgggaagattccgcccatgacctggccatagcatgtaaactggattatgatgaggacgcaagcactttactgaaggaagtgcagccacgagcaaataaaattgcagagcatcggagaaaatacgaacgcaagcgtgaggaaagagaaataaatgagagaaaggagcgtctgaagaaagccaaagaggagaatgagagagcacaaagggaagaagaggctcgtcatcaggcaggagagcagtttggtggattcccaggtgggttccctggaggaatgcctggcatgggcggaatgcctggcatgggcggaatgcctggcatgggcggaatgcctggcatgggcggaatgcctggcatgggaggaatggctggaatgccaggagtcagtgacattttatcagatccagaagtgctggcagccatgcaggaccctgaggtgatggctgcatttcaagatgtagctcaaaatccagccaacatttcaaagtatcagaacaaccccaaggtgatgaacctaatcaccaaactgtcaagtaaatttgggggaagtgcataacctgctgaggagtctaagcaatacaggaaataagccaatggtcgggccatatccgttatcacgctggtgtggcctgctgtattttcttctcccttattaccctctgatgtgattgctgctgtaccacagaaatcagccagcattcagcatttattcctatgacagatacggttctagagatatggaggttaatgttcatgttttgattttttcctagcttgtctggaaggagtttgtgttttaataggcaaattcagtcccattctggagatgcagtccactttatccaagtatactttgtatattagcactgtaataaagtagggcaataaaagcacttggctgtttttcctccaattggccaccatgtccaaagcaagttatctgaaagaaaaatctggaatctgtatgtactcctcctaaagcctgagatttcactggattttattaataaaggccgtttcacctctccgcctcaatgataaagattttggtaccccttccagccacccaatctcctttcactaatgacttcaacataacaagccattaaagaagctctgcacaaactggaaaatgtgtattttgacttactttaactatttttaactacataaatatgcctccagctggcaatcatcatcattaaaaaaaaaaaaaaaa

SEQ ID NO: 334 - DNA, 2308 bp, Xenopus laevis
ctacagtccccggtcacacgtgtctgcccagcgcgagtccgtaagtgcggtagcaattggcggacagacggcggaccaacatgctggtgctattcgaaacagcggcgggttacgccattttcaaggttctggacgagagcaagctgcaggaagtagacagcatatggaaagagtttgaaacaccagaaaaagcgaataaagtggtgaaattaaaacactttgagaagtttcaggacacaacagaagcattggcagcttccacggctctggttgaaggaaaaattggcaaaaatttgaagaaagtcttaagaaaaattgcagcaaaggaggctcatgagcaacttgcaattgcagatgcaaaacttggtggtgtcatcaaggacaaagtcaatatcagctgtgttcatacttccatggtaacagaactaatgagaggaatccgcaaccaggtagatggtttaataacagggatttcatcacgtgaaatggcagccatgtctcttggtttggctcatagtctttcccggtacaaactgaaattcagccctgataaagtggatacaatgatagtccaagccatatcactacttgatgatttggataaagagcttaacaattatataatgcgctgcagagagtggtatggttggcacttcccagagctgggcaaggtcatcacagacaacctggcctattgcaagtgtgtgcgtgctgtaggtgacagaatcaactttgcaacatttgacttgtctgagctcctcccagaggaggttgaaacagaggtaaaagctgctgcagaaatttccatgggtactgaggtatcagaagaagacataaacaacatcctgcatctgtgtgaccaggtcattgagatctcagagtacaggtctcagttgtatgactacttgaagaacagaatgatggccattgcacccaacttgactgtgctagtgggtgagcttgttggtgccaggctaattgcccatgcaggttcccttttgaacttagcaaagcatcctgcatcaactgtccagattttgggagcagagaaagctctcttcagagcattaaaaaccagaaaggacacccccaaatatgggctgatttatcatgcttctttagttggacagactacccccaaaaataagggcaagatttcccgtatgttggcagccaaggcagcccttgccatacgatatgatgctcttggagaagacacaaatgcagaattgggtgtggaaaccagagctaagctggagtcacgtctcagacacctggaagagaaggggttgaaaagaatcagtggcactgggaaagcattagccagagcagaaaagtatcagcacaagagtgaagtacggacatatgatccttctggagattctacactgccagctgttccaaagaagagaaagtttgaggaggtagaagaagaagagcaaccaacagaaattaaggttaaagctaaaaaagccaaagtggaggtagtgcaggaagaagaggaaatagaggaagaaactccaaagaagaaaaagaagaagaagaagatcaaagttgaggaggaagaggcagaggcagtagaggtagaagtagaagaggaagaaccttcaaccagcacagcagctgagactccaaaaaagaagaagaagaagaagaagaaggtgaaacaggaggaggatgagtagtaaaaaaaaaaaggacaatattttatggactcttgatcttatgcgatttagatacatggcgttccctctccagaagagggatatttgagaacttctctaaaggtcttggagaaggcacactgtgactccttaggataaaccaaggattcaaaatatggaaaagaaatacagtagtatcattctttgatacacgcagacctcttaatttctcatttcaaaaaaaaaaatccatactggacatgtttgttgctgtccgtttatagttttgttttgtttttgttaaaacaaattaataccggttgtgtatataacatatattttctcttttcaccaaatatactttataaaagtagtttttgttgttttggtaacaaaaaaggttgtgaacaaggaagtgatttttggaagtcttacccctgtttggcacctacattaatcatggcctatttacagcacccatttggtaaaatacagattacatcttcagtttgtgttcatttttataaaaagtgtatgtagaactgttaatttttacaatacattagtagtacagatggggataacaaacatgacaataaatagaatgtgttaagtggtaaaaaaaaaaaaaaaaaaaaaaaaaa

SEQ ID NO: 335 - DNA, 1798 bp, Xenopus laevis
cacagtgaggcaaaaaccaggaagagtgaaactgagccacagtgaagcgggacattaagtccacaacccgggacagcaagacaagcagctgaaacggggctgttgggtgatttcattgccacttctgccagcttcacctgacagattgtctgagaatccatcatgacttccacaaaacagaagacatcaagaagcaaagatgatgccccacatgaactagagagccagttcatcttgcgactcccacaggaatatgcctcaacagttaggagggtggtccagtctgggagtataaatacaaaagacagactttctattgagttacatcctgacggacgtcatggaattgtacgtgttgaccgtgtcccactagctgcaaaactagttgatgttccctgcacagtggagtgtttaaagactatcgacaaaaagactttctacaagactgctgacatctgtcagatgttggtatgtactcttgatggagacctctatccacctcttgaggagccaactgggactactgacccaaaagccagcaagaagaaggacagggacagagagaaaaaatttatttggaaccatggaatcacgccacctctgaagaatgtgcgaaaaagacgcttcaggaaaactgcaaagaagaagtatattgaatccccagacgtggagaaggaggtgaaacggcttttgagcacagatgctgaggcagttagtgtgcgatgggaagtgattgctgaagatgaatcaaaagaagtcgagaatctgtctgggttggatggatccccagggatgtctggaatcaaacagggccgtggttcttcagcagtggagagggaagaattgcgtcagatatttaatgatattagtagtagcagtgatggagaagagggagaacgccaggaagaagaagatcttaatatcatggagactgaggaggagcagagggcaggacaggatggtcaaaaaggaggcactaaccagattgttctggagatgcagaaacagttggaaaatttacagaagaaactgagggagacacaagaacgaagaaagcgacaagaagagcttataatgaaggttgaaaatctagcattgaagactcgcttgcaagctgtactggatgagtttaggcagcaggaggagagagaaaagcagcagctgacatcactacaggagcagctcgaggctctgatagagaagtgagaagttttcatgtggtttccatggaatttgtaacttgcccaccatgctctagatgtacagcatagagggggattctgccttttaataagtctgtctaaaatatcagtttttgtgctgaaaagtatatatacacaggacgattgttgacttcgggccattcgaaggtaactgcatgaggatgttacgctgcaattgtgtgtgctgtgactaaatggttgctgtacattacagaaataggccagataagcataaaaatgttacatgtatgatttcttactgtaatgttcatggggcaagcattatgaccccagcatttacagtttaacttatttagaatcttgcctgctgttcatttccagtacaatatttcagattctgaactcagatgctcaaattaagagaacagagtgagcccaaaacactgatgaatggcttgttaacagcattagtgttaagaagaatattgacagctacagatgaactctaaatgattttttaacacttttaaatgtgtcaccccacctactattccatccaaataaaatcttttgattgttacccttcaaaaaaaaaaaaaaaaaaaaaaaaaaaa

SEQ ID NO: 336 - DNA, 2774 bp, Xenopus laevis
ctcaggggctccacactcacacagaagggacattgggtcagctcagtaagccggccggaggacacggtgctgagggaccatggcccgaatcccaacacttggcctactcttactattacacctggtgacatcccaagggcagagagctggcccccgaggacccccaggtccaccaggacccccaggaacacctggaaaggatggaatagatggtgagcaaggaccagctggattacctggccctctgggtcccaaaggaacccctggaaaacctggagaagcaggaaaggcaggcttggcgggacttccaggaattgatggactgaccggaccagatggtaaagctgggccagacggaccaccaggagaacggggagatgttggaccctcaggaccagacggagccccaggacgaggaccacagggaccccctggtcttgctggacaaagcggattaccgggtggtattggaccacaaggaccagcgggaccttccggccaacccggacttcctgggcctccaggccccccaggacccccaggcctcccaggagttgctcctgatggcaatggagacctgcagtgccctgctgtttgtccccctgggcctgccggacctcctgggatgccaggattcaagggccataccgggcacaaaggggaaaggggagagcttggaaagaatggacaaaagggagactctggtcccccagggccctctggaatccctggcagcgtgggcttacagggcccaagaggtctgagaggagtacctgggccccagggagctgcaggagacaggggccccactggagtccgtggccctccaggacctcctggaccccctggtaaagctggggatcaaggagaaaaaggacacccaggatacagaggacccaaaggagactcgggcaaagctggtcctaaaggaatgcctggcgggcctggccccattggggaaccgggcatgccgggtcaggatggacgagatggaatcccaggactggatggtgagaagggtgatcgaggcagagttggagttccaggagagaaaggacccaatggcctccctggcctgaatggcaaagccgggtccaaaggagagaagggccagttgggaaacccaggagagctgggagaagcaggaccctctggagagccaggtatccccggtgaagctggacccccaggagagcgaggggaggcaggacccagaggaactgctggtggtgttggtttacagggaccaataggagctcctggagtccgtggatttcagggaattaaaggcagtattggagatcctggcttgcctggcccaactggaattcgaggtggatttggagagcggggtcctattggagctgctggtcccaaaggtaaccagggacttgctggatctgatggacttccaggggagaagggagagatgggatattttggcccagttggacagaaaggagagccaggtgtgcgaggtgaggccggacctaagggagtggcagggcccaatggtacttcaggtgtccccggtgtccctggtcagccaggaccaatgggcttccaaggagaacagggcgtccctggaattactggaaaacctggtgttcctggcaaactgtcaagtgaacagcacatcagggagctctgcggaggcatgataagcgaccaaattgcacagctagctgctaatctcagaaggccattggctcccgggttggttggacgtccaggtcctgctggacccccaggaccccaaggagcctcaggtcggacaggacatcctggttctcgtggtcctcctggatataggggtccaactggagatcttggggatcctggtccaagagggaactatggtgagaaaggagacaaaggattggttggacgaggaattgatggaccattcggagaccaaggaccacaagggccacagggagtatctggcataagcagagatggaagagacggggcacacggtgaggccggattccctggagaacccggaagagcaggaacaataggggcacaaggtactcccggaatatgcgacacatcagcttgccaaggtgccgccgctgctgggaaatcgagtggcaagaattcctaagccgttccagaatccgaccaattggagctgaatttttactgcagtgcctgggtgcccacatctggcccgaccctcacaattatccggagacagacgattgtttaaccacagacattacgaggggagactttcagcgtcccaccagctgcaccaacaatggcaacatctgatagaaatatcctagaatttaatttttttttttactgtgtaagtgtatgtttaacccgacctcccttgtgtgttacctctatggaaagatcgccccgttccctatagactcacccctgtactggatttgccccaatatctgctcacaaaggcaacacaaatactgagcccctcactagaggtaagtgtatagagaactgcccctggactacagaaataggaaataaaaagcagcgtgaatctttatccccctgagggatttccagccgtgatcatgtagtagaacatgtattgcgtgtaataacatcctgtcctgtctcagcacacgccaatcccgcccttggggggacaaataaaacagctgcacccttgtgaatatccaggagttacatttagtatttattttggtgacttgtatgtacaataaagcctgttgcgccacctgttggaatgaaagaataaagccacttccagtccacacaaaaaaaaaaaaaaa

SEQ ID NO: 337 - DNA, 1908 bp, Xenopus laevis
caaacttgaccccctctctctgtcatggctgcccccgtgcggtgcttacggtcagtgctcagccattgtaacaggaatttgaagaagcagacacgattcagctgtccatcatccagctgcacatacagaagctgcaactttgttagattctatgctgcacctgctacatctagcaaagcttcaaaaaaagaaaaggaaaacgagcagagcaagtctaaattgataaccaaagaagagcttgaggagaaaaggaaagacaccagcaggcccaaaccttatggcctcactgcttggaaacccactgatgatgtgtatgtggcctgttactatcctaagcctttgcttggggttgaaactgccatagatatgctgaaaacttttcaaaagctggattttacttatgaaaaacagccagtctatgccgagcttaaactagacatgaagctggaaaagaagaaaaaagtggacccctttgttggatatctcaagtatccttatcctttttcaacagaagcaaataaggttttagtgttcacagagaatccaggtgatgctcagattgctagagacaacggagcagcttttgtcggtggaagtgaatttgttcaacagattctggatgatgaaattcaagcagatttttatattgcaacacctgaaattgtcccaaagttgacgccattaaaaaataagctaaggaagaaatttccaaagagcaaacgaggttctgtgggccgtgacattcccaagatgcttcagctgttcaaaacaggccatgagtatttagtagaaaaggaatgtttggtacagaccaaaatagcaacgttggacatgcctcgagaacatatagctgctaacctagatgcagttataaaggatatctgcacttacaggccgctgagctatggtccctttgtggagagagttattcttacaagtgccacaagcgaagctttgttcatcagatttcagcaatttcttccacaggagacagaggaatctgcaagcaaaacttccgattaattctgctactatgtaaaattaccagttctctctaactagtggcataactaccatataggaggccttaggtagacaaagtgcacaaacattgtattgtatttttagaagatacacctgatcccacaaaccattatattctgtttgtgtgttggtctgtccctctccttcctctacaccgtaatgcaactcccagcattattttgttccatcaggaactggtggattctgggactctgttctgctttccagagaatctgtgcaacaaccactattataagcagagaaatttaaatcatagaattcctcactttacaaaaatgagggagaaagttgaatagcactatcatacaggatgttgggacattgctttatgagttaactttctgtggaatcaggtgtgtttgcataaaaaaatgtaagttcagatagcgtttctgcaccttttctacttaaagccaactcaatgagctcatgtcaaaaaccagggagcacttttttttttttttaacgttatcgcttcctgaagattttttcatgggataaggagcatcaggcccttttaagttataccactgactttaacagagaatggcacagacattcataatggtgatgctttagattaggactcaggccagcattgccaataaaaatgatatttattactggatgttcagactgtttatgtacagtccaacaaacagctagtgttaaaaatggaggatatattttccgtttgctcatctgcagtaaacaaggctttgtgatttttttttttaataataaactgctttttgttatgcatctgtgtccagccatagtatgatgggttgaaaccttactgtaaacaaataaaattcattccaaataaaaaaaaaaaaaaaa

SEQ ID NO: 338 - DNA, 2994 bp, Xenopus laevis
gcagctgtgtgcatctatgtcgcctgtctctctgtgccgataatgacagcttactaagaaacaccagatgcctgtgccatttttgaagtcttccatgaacagacagcaatgctattgctagggtgcagtttgcaaatctctaaagtctactagcctacagtgtgtggttttccattttaaggaatatttggcttttacaatgaacatttggtcggaaaatacaacagacattcaaagaacacctatatgaagaatttcaaccttttttcctcacaaaagttttaattcccccagaatgcttattagtgctaggaggttaagaagatgccagtctcttcaattacttgcctcatgttttgttttatcattaatggctttattggttcaagaagacaattccttggtcaaccacgtaaagtcctattcatacaggtacctcataaatagctataactttgtcaatgatagtctgtctgttcctcgggacagatctgatggggcagctggctacagatatctgatcaataacaggcacaaatgtctaaatgaggatgtactgctcttactgtttgtaaagacagctcctgaaaacagaaggcgccgcaatgcaattcgaaagacttggggcaacgaggattacatccgttctcggtatgctgccaacattaaagttgtgtttgccctcggagttgaaagagatccagtaaaaagtcaccacactcaacaagaccttgtcaacgaaaacaaacgcttcaaggatctaatacagcaagacttcagtgacaccttccacaacctaacccttaagttgcttttgcagtttgggtgggtaaactcattctgtcctagtgctaaatttattatgtctgctgatgatgatatctttgtccatacccctaacttggttacctacctaaaaagcttgcctattgagacacaggatttctggattggtagagtccatcgtgggtcacctccaataagaagcaaagccagcaagtattatgtgccttatgaaatgtatccctggtcatcttatcctgactacactgcaggagctgcgtatgttgtttctagagatgtggctgcaaaagtatacgaagcatcgcagacattgaacacaagtttgtacatagatgacgttttcatgggaatctgtgccaataaaatgggagttgttcctcagtatcacgtatacttctccggagaagggaaatctccataccatccttgtatttacaacaaaatgatgacttcccatggacatttaggtgaccttgactatttatggaggcaagctacagactctaatgtaaaatctcttagttctggatttttgggtaacgtatattgtaaaatagtaaatatcatgcttctctgtaaaattggctatgtggatacatacccctgctcagctgcatggtcctagtacaactaaagagtgagtttgtaggtgcagcaccaaggaatccaggaggtagaaaaattaaaaatataaacctttattcaagcattttaaaatggtagtaggaaaaagcatgccccacactaaacaatgggctgttcactcaacgcgtttcatggctctcgccacttcctagtacaactgcaatagttggccaaagtgcttgctttcagtttgatttttttttttggcaaatattctctggatcctttgtggtccccacccgtctgctcaggaacatatactatttttgctttcaataacgcttataaaatcagttactgaacagcaataataaaatgcagaaatgtttactgtgacgcactgtatcactcatgctgtaatgcattaatggctgtgttttatgtatccatgtccttgtttacagatttattgtgaatatctagaaatgactgttgttaaacaatgcaagagtataaagcataaaaataatccccatgagcacactgctcagatgagttaagagaagccagatggagttcattggcttcctaaggagtcctacagatgtactgcactgtctaaagcaaggggccttatggatctccagctcagctttagcagttgtgggatgctgggaagtttagtttgcaacagctggtgaagacccatatggaaatctttggtctgaattgttatagtgccttctaatgctaagctaaaaacaccaatataagtgtctgatagtttgtattcatacatgttacacaggttgactaaggtgagttttaccatctaaaaagctgtatgtaaggcgggtattagacattcccacaaactaatacccaattaatgggaaagctgcctctgaaatcatagttcatttattctttccacaattaacaacatcattgcatttacatcaaggatgagtaacctgcatctttccagatgctgttgaactagttttcccattccaccgatagtgagggtagggagatgcccttgttccttttttaaataattgttatttttcaattatttaaatactttgtattaatatagcttaaaccacttctaatgttggtatagtcacagggcagtgttctttataaataaagctctttagcataagaaggaacttgcaaactagaaaaaaaaaatgtgaaataatcttagtgtgaacatattttgaactacagcaggtctgttttacacaaaaaatatatttttatactctagtagaactgcttatttattataaaagatatgaaggcaggtaaaacaaaccgcctgaactttcatgtactggaaatccttttgataactttagttctttttgtggagggatttccaacaaaaatggtgctatttactgcaagtttgtgagacggagagagccatttccatggcatttatacatcagagtgtttcagtggttctcaagtagtgagttcctagtaaagcacacgtgcacttgtgtgtttgtctacttttagctgtatgttttgtgtattttttatgttataaagtattgctttactcatgagcaaaaaaaaaaaaaaaaa

SEQ ID NO: 339 - DNA, 2563 bp, Xenopus laevis
cagaaacaccgcctggggagtgttgagaggagtctgcatcctagtgacaggaagaaggcacggtccgtcagtttgtgttctgcacgtcctgttgtatacttcgcctttccagcagcaccatggctgaacagaaggaagtcaaatactacactttagaggaaataaagcaacataaccacagcaagagcacctggatactcctccacaacaaagtgtatgatgtcaccaagttcctggaagagcatccaggtggggaagaagtgctgagagaacaagctggcggagatgcaacagagacttttgaagacattggtcattcgacagatgcaagaaacatgtctaaagaatttgttataggagaacttcacccggatgatctatccaaaatccagaaaccatctgaaaccttcattactaccactgattcagattccagctggtggagcaattggataatccctggaatatctgcaatgatcgtagccttgatgtatcgtttctacatggtgtctgaataaatagaatatgggaaccactgaggaaacaactctgctccaaatcactttgattgtgtatgatcatcattttacgatggccataatggagctgttgtgaatttgcgcctgttcttcaagtgcaatttttgttccctttattcatgtttttgtacacatagaggagaatatgtgtcttctttatacagtactgggcaattttgcaatccattctaattacaaacatgttaatagcttctttagacttttaataaagaacaataacgataacatttgttgatcagaagtggcaaatgactagcacatttaaagttaactgacattccctcatatccattctaggtagtccataataaattgcaaactgttattccagcacatatcgtaagtatggcaatctgtgactcgtttgcttttagtcattagtccaataaatatgacgtgttgattggctggtgtaggttacagctggagcagttggattctgactaaaggctcaaaagaatgtcctcatgcatagagcctcttttaccattgtggttgtccacagctgttcctggctgtagagatgtattgtctcatgctcatgatattacttttgggcattttggttgatacagaagcctagacaaccttaaaggatcagtatactacgggaaaaaaaaaacccaacacatatctccactattatgtgtgtaatgtaaatgtttcagagggaaacggtactgatatttaaacccatactttctgtcttcaaatcaattggcaggctacaccttaccctttaaaataaaatagtccaaatataggctaagtttcagcatatccaactgattaagccatgtgacagtcgattgggctttagtatgattttagatgatttggcggttccgtccggtattcatgggtttattatgtattatatatatataatggacccatgagtgctggacggagttgctaaatcaccgaattaaaaataaatctgccaatgtacagggcatcagcagatgagaaaatgatccttttacatcctgcttttcctaaagtttgggcttatgaccccaaaccacaacaatagaaatgtgaccctacctagtatggtgccttgaatggtatctgtctactcttcccagttagacactgtgggggttatttattaaagtccgaaggccaaaaactcgaaaaaaaatctagtttcttttactatgaaatccaaaattttagtgggaaaaaaaaacttgaattttttggtatttattatgccttgaggatgaaaaaaagtcaaaatctgaaaatccagcatctcagacctgccgatgttgtatataagtcaatgggagaagtcctgaagatattctgatctgcgctgggtttcttgcaacaatccaaagatctttaaaaaattaatctgattcgaatttttctcaagttttttcctgcacaggaaattttcaagaaattgtattgataaattagggcaaataacctgtgcagatttggtcggagtatatttcagaaaataacgagataaatttgaattatataaccccctgtgtcgtccgcccatgtatggccgcctttacactgatctaatctaatgtgtgcagcagggtaatcctcctacattgaagctcgattcatacctcaaaagcacagttgcttgcaacactaagggactcatttatcaaattgtacctgcatatattaaaaatttgctgggatttctagcaatcaatcctattagccaaattatttaatgggccaatttgatcaattcaaacactattcatattaagaagcgaacatttctcattcatctctaaaaatcattaggtaaattctgtttatgattctacactgacttacaatgttcattataataaaacttgtatacaaagaagaaaacttgacaaactagatggatttgtgccttttttgtgtctggggaaaaacccctctgctcttatgtaactatagcaattgtgaccaatgtaaaagctgatgtttcatgtattaaaaagtgtattcataaaaaaaaaaaaaaa

SEQ ID NO: 340 - DNA, 5205 bp, Xenopus laevis
cgtcgggattgtgtgaaagacagggaaccaaggcgcttgttggtgtaacagctttgcgggaggtaatccaaactgttaagaagctgaggacaacatgtcccatgttctgaacatcagaagcatcagacaggaggacattaagaaaggactgcagtttattcagtcttcactgccttacttaggaacacaggaagattatgagattttttttgaaaaagcttgtcatagatctttacaatgaaggcaatgatttatatagagaagactgtgcgaaggattccctaagccagtatactgaagctctaagcatagcagagtatgcatcttctgatgatatcaacatccccagcaagacttgggaaaggctgtacgtgaaccgggctgcatcctacttggaaatgggtttatataaggaagctttaaaagactgcgaagatgtactaaaattaaatgactgcaatcttagagctctgtaccgcaaatccaaagccttattcatgttagagagatacacggaagcttatgattctgtagccaagtgctctttgagtgctccacaggatgaaagtgtggtgaagttatcccaagatattgctgtaaagctaggcctgaaaatcagaaaagcatatatcagagccaagacaagtttaagcatggcttcagaagaagaaggaagaaagaatgtggactctcttgcagaacatatagaaccagatctacctgcatttaattctgaaagccctctcttgcccttctcatcacttgctgttgctactgactccttcagtggaacaccttcatcttcagcctgcatctcccccagtgtgtttcccattgcagaagtgggaacatttccttctgcgattgccagtaatggcgtatcatctccattttctatcacatgtatgaattatggagatggagatattctaggtgatgaactggataaatttcttgattcagtgccaggatcaaatgacattcataaggcaagtgctgctgttggactcttcccaagcagtaaacaaaatatttcaggatctccagtacaaaacatacctgtctttcctggattttcaactgatcaatactccccgtcactgatttcatcctttgaatctatggttttgacctctgcaactgtaaccgactatcaaggcgacccatcggttttaggacaaataaatggaacatccaaaacaagtatatcagacacatcttccttcatagggaaggactccacatatctcttcagacctaatagtcctgatattttaggggcttctctgaagatatccttaccagactctttagttaatggagcccagtccatttcacagtgtactttgaaaggcattaaccctcttgaagatacccatgaatttagacaggcttgccagttctgctttaccaaatctgggacaagccaggcctttgtatttaattctggtttaaatcataaatgtaaaaaggatatactacttggaaggattaaaagctctgtggatgcatcatggaagaaaataagaccaaggccaaaaaatcaatatttgggacctttctatttatgtaaagatgtcctccaaggaaatgattgtacatatccaaactgtacctttgcatactcccaagaagaaattgatgtgtggacacaagaaagaatgggaaccttctgccgagaagccctttttgggggtaaaggcaagatcagccttacaataccacatctactacaggaacaccctgggacgtttgtgtttctctgtgggaaatgctttgatcacaagcccagaattataagcaagggaaatatggacaacccttttttttgttcacaccctggtttaaagcatgcttttcaagatgtcaaatgccttgtgcacataaacctaggggtgactgtaaaatattcaaagatccgcccttttgaattaaattttgtgttagacttatgtcgacatgaggttcgatatggatgtctgagagaagactgctgcttttatgcacatagtttggtagaactccgggtttgggtcatacagaaggagacaggaatatctcttgatgccattgttcaggaatcaagaaagagttcagcagcggagtcatttgcccctagatctcaggtgcttaatatcccaactaatgcaggtaatccaaacgccaagataaagtttgtgtgtggacagtgctggagaaatggacaagtcatcgaggcagacaaaaacaagaaatattgtagtgcaaaagcgagacaccagtggagcaaggaccaccggattgtcttagtgatgtctgagcgtaaaaagtggatagccattcgcccttatccagcaaagaaaccagctcctctgcagtttgagatgtgcaatcatattgcgagtggcaaaaaatgtcagtatataggaaactgttcttttgctcacagcccagaagaaaaagaaatctggacctctatgaaagagcttgggcttcaggacatggagcaactatatgaaaaactgatgaaaaaagatacagttgaaaaatgggatggagcctcagctcaagtaaacaaacaaattcatcttcctactgactatgcagaaacaaccgttgattttcattgctggttgtgtggtaaaaactgcaatagcgagcgccaatggaacatgcatatttcttcagagaagcataaagaaaaagtatttcactgtgaagaggatcagaatatttggcagcatcgcttcccaactgggaaatttactgtatgcaaaaggttcttatctggcaaatgtcctgaaggagaagattgcagttttgcccatggaaatgccgaactcgaagaatggatggaacgaacacaagttctacggcaaaaactcctcaaagcacgcaaagataagctcattagcccagatgataatgactttggaaaatatagttttctgattaatgatttaaactaaatggcagaaaataacaaatgatggataaaaatgacctgatggattaaaatcccatagacctgagacacatctagctgtgtcagaaaagatgtttttgattctcttgatattatgggccatgctaagcagaactgggcagatttggaaagtaccacagagaatctttactgtatgacatttagtctgcttggcagttaagagaccaaagggacaataaaggtacaggcctaatatcaccatcattaccagattttgtagggaaaaaagtgaatataatcacccaccaatcacatttaaagtttatgtttatatatttataaattgccataaaagcactttggttgtgagaagactcccgagttagtcaagaaatctgaaagttctatgtaatatttttcaaccatgtgtttagcgtggatgcatgatccataatattgtttgttattttgcagcgcaattcttttcatttcatttttttctcttatttgtggaggcagcaataaatcaaaaatctaatttgccaaacgtgggcaaattttatatgtgctatccttgatacacaaagcagaaaattatatatatatattcttaagaaatatttctaataagcccttgtgctatgacgctgcaccctattgagaagaacatttgaatattccaaggcctcaggaatgcaccgtagcatcttatttgctgtttttcctcctgctgatacaatcgtttggggtaaattgataacagatggaaaaaatgttcaaggtatagtaacccacagcaaccaatcagatgtttgccttgacttgacctgctcattggtttctgtgggtaactaggttctttgaactttttttttaattttccttaatattccttaaattgttaaacaattataagtttattcttacaactacatcctgaaaaaatgcaggagaaccaaattgtgatttaggcgtgtgcttttcctactgttagttgttataaggtcactttttgttcacgtttgtatatatcactttactttttaagtgtcctttcctaaaaaaataacattatacgtgctttatgtcatttagtcttcttacatttatacacttgttcgttaacttgtttttattgcgttttagaacaaaacataatttttattattttggatgcaatgttattagaggagagtctctttcctttccggttctgtctagggatgtgccaaatccactattttggattcggccaaaagattcgaaagattcggaagattcggacgaataccgaacctaatcctaatttgcattgcagggaaaatatcttttacttccttgttttgtgacaaaaagtcatgcgatttccctccccatccctaatttgcatatgcaaattcggttcggccgggcagaaggattcagccgaatcagaatcctgctgaaaaaggccgaatcccgaaccaaatcctggattcactgcatccctagttctgtctaagtcctctgtatcattccctaatctttgtcataaaccactgttgttaaccacaccgtttgaaagtcacaacaaaaaaacagatgcacgataatggagtgctcaacctgtaaaaacataaacacacttggtttcagtatgctttaatacagatgattaatcagatggacttttgcgtagcttttgtttttttagtgttcgttctatataatggagtcaataccatagcactgtaaaccttgttacaatgtacagcaatacaaagaaacgagggtttttcacaacataccttgcctccaaatccaggttagatatccagctattatggtgtctatgcattttgagtagggtgtggtggatataaacacctacagtgagatgtatgcgcttgagatgtaacccttgggtacaatataatcattccagcatttacctttcaccagcatactgaaccacaagttttttgtgccaacaagttttcatttgtagttctaaaaataaacctttgtccaccggtcagatattaacatagtatgacgtgagttgaaattggtttaattcacatgttttaggcctgttgcacatgttgcattttctgcactggcatagaaaacactgatccaacaagcttggctctatctgggtcctcatgcgtgcattttctgctacggacaggccagatgcgggtcaaatcagtgttttctcagtcataaaaacacaatttgtgcaaataccttaggtaccaactgctttgctacttaaaaaaaaaaaaaaaaaaaaa

SEQ ID NO: 341 - DNA, 3653 bp, Xenopus laevis
gcacgaatatccatgggataagagtacaaaatgtcattggaaatgaggccatctcaatttgttatttctactagctgcaaatagaatatctgtcgtcagaaaagaattatattgggaggacctcaccaaaccagccagtctggggcaggactgaaacttggagccctacaatcatgttatgctggggaaatgcatcttttggacagctgggattaggggggattgatgaagaggttgttatagaacccagaagatgtgactttttcatcaataaaaatgtccgtgatgtcggatgtggaaacagacacacgggttttgtcttggatgatgggacagtttacacctgtggatgtaacgatcttgggcaactgggacatgacaaaagtagaaaaaagccagagcaggttggagccctggatgctcagatcatcgtggcagtttcatgtggagaagctcacacattggcattaaatgacaaaggtcaagtgttttcttggggtcatgctgcacatggacagataggtgtgtctattgcagaagattatattagagtaccaagaaatataaagagtttgtctgatatacagattgtacaagttgcctgtggacatcatcattcactcgcactatctaaagaaagcaatatttactcatggggacaaaatcagtatggtcagcttggcttgggctcggaaaaaaggaaagagagtgcacccagacatattaaatctctatcaggcattccctttgctcacattgctgctggaggtggccacagttttgcattaacaatctcaggggccatttttggttggggaagaaacaaatttggccagcttggtcttaatgatgaaactgatcgaagtgacccagctcttctcaagtcacttcgctcgcagaaaataatttacatctgctgtggagaagatcatacagctgctttaaccaaagagggtggtgtatttacattcggagctgggggctacggacagcttggtcacaactctgccagccatgaagtcaacccaaggaaggtgtttgagcttatgggaaacattgtgacacaaattgcatgtgggaggcagcacacattagcttttgttccttcatctggacgcatatactcgtttgggcttggtggcaatgggcaactaggaatagggtctaccagtaacaaaaaaagtccttccatggttaaagggaactggcttactcatgaagactatgtccggcgccttcctgaggctaatggatgttactgtgtgaagagaatttatagcggtggagaccagagttttgcacattattttactatacagaattgccttccaccagacgactttaggaagtgcaattgctctagaaaaatatggactttagatgaggcacttataagacgatggctgaattactcctcaggaagacttccaccagaaatagtaaatgaaatagacaaagtattttcatcagctgcaagcttaaatggaagttttctatcaacaagcaacaacgatcactacaggacaagttccaagttctcgggggtagacatgaatgttgctagactcctgcttaacaagttgatggacccatcacagccacaaatagcccaacaggtggctgccagcttagagaagaatctcattcccagactcacaagttctccaccagacattgagtgcttgcgcttgtatctcaccctcccagagtgtccccttatgactgaaaccaacaacttccgttctttagccattccgtttgctaaagctattgtaagcttagataaagcaccattaaaagttttagaaaactggtggtccctgcttgagcccacattatacatgagaatagtacaactttataaggatgttgtggtgcacctattgaaactccccaataatagaattcctcctgcagagcaatggatattctacacctttcttaatactgccttcggggttttggagatcctgcacagggtaaatgaaaaagctgcacagatcatatcttatgataaattttacattcatgaagtgcaagattttgtagatatccgaaaagactacttcaactggtttcagcaacaagcgtctggaatgattgctgatccaccggttacaatttgcacatatccctttgtttttgatgctcaggcaaagacaacacttctgcagacagatgcagtcatgcagatgcaggaggcagttgacaatgctaacaggcagaacatctcgtcctggtttcatcctatagttgaatcagtggatacatgtctgatattaattgttcgcagagacaacatcgttggtgatgctatggaagttctaaggaaaacgaaaaacatagactacaaaaagccaatgagggtaatctttgttggagaagaagcagttgatgcagggggcgttcgtaaggagtttttcttactagtcatgagagaattactggaccccaagtatggaatgttcagatattataaaaaatcaagattaatctggttttctgatcagacctttgaagacatcgatttattccaccttattggtgtagtctgtggtttagcaatttacaatttcacaattattgagctcaaattccctttggcactatataagaagcttctgcaaaagaaaccatccttggaagacttaaaggagctgaagcctgttgttggacggagcatgcagcggttgttggactatactgaagatgacattgaggagacattctgcctctattttacaattacagtagaccactttggaaccatagaagacagagagctaataccaaatggagctgagacaccagtgaataaaaaaaaacaggcaggaatatgtggatgcctatgtagactacatctttaacgagtcagtggccgccttattcagcgcgtttagcgcagggtttcacaaagtgtgtggcgggaaggtacttgagctcttccaacccaatgaactgcaggccatggtgattggtaatactgtctatgactggaaggaactagaaaaaagcacagaatacaaaggagaatattgggccgaacaccctacaattaagatgttctgggaagtttttcataaattacccttggaaaagaaaaagcaattcttgctgtttcttactggcagcgaccggattcctattctcggtatgaaaagtttaaagcttgtgatccagccaacaggaggaggagaccagttcctaccagtagctcacacgtgtttcaacctcttggatctccccaaatacagccataaagaaactctgcgatccaaactgattcaagctatagatcactatgaaggctttagccttgtctgaagaactgctatgagtgtcatcatttcatttcagcaatgtgaattggagtttctgagcaagacccccgtaaggtttcatttttcatgtatatccacgtggataagcagctttgccacagtcatacacagctcgggacttgttgtgtgtttgggtctcaccatcttaaaagtaagaatattgtcaacgtgtaggaccttatttcttatcagttcatgtatttgtgatcaccggcaatgtgtcttattttgcagttgacgcaacatgttctctccacctgatttaaataaaggtgtgtttttacattattaaaaaaaaaaaaaaaaaaaaaa

SEQ ID NO: 342 - DNA, 1379 bp, Xenopus laevis
ctcatcctgtctagttgctgaacatgcctgagcccgccaaatccgctccagccccaaagaagggctccaaaaaagccgtcactaaaacccagaagaaggatggcaagaagcgtaggaagagcaggaaagagagctacgccatctacgtgtacaaagtgctcaagcaggtgcaccccgataccggcatctcttccaaggccatgagcatcatgaactcctttgttaacgatgtcttcgagcgcatcgcaggggaagcctcccgcctggctcactacaacaagcgctccaccatcacctcccgggagatccagaccgcggtccgcctgctcttgcctggggagctggccaagcacgccgtgtccgagggcaccaaggccgtcaccaagtacaccagcgccaagtaatctctctctccccattccctgccccacaaacccaaaggctcttttcagagccacccacctcctctgtacaagggctgcacctacttccactttcatccagagtcgcttagtatttacattcaacttctatctagaagatttacaaacacccttctgtgaagaggctttagcgccacggcgttatagtttaacgtctgaagccttccttactccgtgcagtatttgcctaaaaacaggatttggctcttttcatatagaacaaaagaccacaacgcttctgacggttttcacttgatggctttagctcaccgttgtttcagtccacacacacacacacacacacacacacacacacatgaatcagttcctcccttaggttaacccttatcactgcctagtcctaggcccggagttctagttggatcagttttgccattaatccgctttctggagggctccggtggatttcctttggcgtcagatatgaagtggagtataagcgggtggtctctacctgctctctagttgtgctccatgtaacacaatggttgttcaccttccaaacaccttttccaatctagttgttttcacattgctcaccagaaataaagactttcttcaattaccttctattttttattgtttttctaaagttgaagtttaaaaacgtgaatgtccctggcctttcagtctggcagctcagttattcaggcgcagattctgaactgttacaactttgcaacatttgggtataacaattggttgatgcaaatttcagcaacatcgctggtgaattagcaactattgtatcaattctgactgctgcctgtaatcaaggaaactcagggattctgcgctgcagggacaaacagaagaaatgtatcaatttagaaaggagtctaaattagagtcagcgaccccctcctttcatagctactttagaatgtaaaaaatgtaaacaaaaaaaaaaaaaaa

SEQ ID NO: 343 - DNA, 1412 bp, Xenopus laevis
cccacgcgtccggggggcggtttcagcaagggacggcgcttttccatagtgaatcaattacaggtgtattcaagcctgggagctggagtagggagtcgctctgggcatttcttgccttgctttcgggcatagtcttcttttgtgcgaccagatgcactgacttgtctcaaggaggatgtcagattgctcttccacagccttcgctttgtgagttggggttcatgagaccactgcgggtgggcgggcatttgatttattatattcgagcgtcccgttttgtatgaagtccaaccgtatctgtggtactgggaagcaaaagggaggagctgggaggagaagcacaagcggacgaagacttccctgggttaggagcttcgtgtcaatgggtgtgaatggatgatgattcagagaaaagaaatcaagtaaaaaggggtcatttcccctggatgatgtgacagtgttgaccgtgcagctgcccaaaataaaaaaggtttgcatgaaaaaggtttacgttgtgcttggatattcacacataagcctctctgtaaattttgaaccccaggcactgaagcagacaatgaaagacagcatgtctaacaatagcacaactagtatatctcaagcaagaaaagcagtggaacaacttaaaatggaagcatgtatggacaggattaaggtgtcaaaggctgctgctgatttaatggcctattgtgatgctcatgtaagagaagacccacttattcttccagtgcctgcatcggaaaatccgtttagggagaagaaattattttgtaccattctttaaattggttttagtcaaatatttatatagtttaagcatgacatcagcttaacagggctttaccaaggttgttaacaaatgaaactatagtctcaatttttagaagtacaaggcatcgtcaccagaaatctttatgtgattttgtttttgtttttttttatgttaaatcaaagttgtaatcattgcgtagagtcatttatgaatataggagtagaaaaggcatgtaattgtagaaaagcaaatattcagcaatattaattcatggaagtatttcatttatatttaagtatttcttcatgttttttattatcttcataaatgttcaaagggagactgaggaacatgtaatattggttttactcactgatacatttctccaatgccaaactacagccacaactgtaaatactcactgttttataaggtattagccattttgttatttttgtaatggagatacttcgtttgttttgttatgttcttttactagttaaatgaatgaaatttcattcagttttatgaatagtagaattgtacttatttaaagtgaaagttaaaaaatgtcataaagaggattttgataataaaaaaaaaaaaaaaaaaaaaaaaa

SEQ ID NO: 344 - DNA, 2410 bp, Xenopus laevis
gggacacacgagcagttactacatctacttcttcctgtttgactccatgagccaattgtagagtagctaccgcgcctgtgccagtctgccagtgacatttatgtgtgctatcaacaatctccagctagaacacaatgcagatacctgaaactagttcagttcaccagaatgaatggcaaagagatgtttttgtgctgagctctggcacctgcttacctcaacagaaggcagaagtgtatcgtgcacatcttgcccagattcagtatgcatgggctaattctgagatctccgaggcatcggcagtccacctgttcaagaagtatgctgagaagtactcagcaattcttgactctgacaagttggaaattggcctgaataactacgcagacagcattttgactatggcaaaatgtcagagaaatgaaagtgacaagtggcagtcttccttgacaactaataatgttttaaaattaaagagtgtgcaagagatggctgaggcaggcagaagagcccagttgtctctgttgaattcaacagatgcctcagttagagttgggaatgaaatcggtacatctggatattccactgttcttgctcataatgtccttagaaacccatcacatgcagttcctcatgctgcttcttcagattgtcaaataccagaggggagctcaaactttctgcaaaactccaaggtttcagcatttactaaagcaaatacttcttcaaacactttgattaacaacagtattcctattaatacttccttgatgcaacgcaatgaagtcaaagctcccacgacgttctctactcagtctggcccaaatgtgttttcatctactacctctgtatattcagggaaaaggaaagcatgttatgccttaggtgatgagagcactgatattcaacctaagcctttagttcaaaggcagcttgctagcaaagaagctacaggtgacagtgactttaaaaccgcaaaagagcagttgtgggttgatcagcagaagaaacacagtaatcagcctcagcgtaatcctggtcctttgtatggtggtggcaaaaagtcactgggagctgcacgttctcgtggtcttcatggaaaatttattcctccacttcctaggcaggaggatgttgaggatagcaacaggaaagtatatggccagggcaacagtgagatgaattcaacttctgatgaacatttaaaaaacatagaaccaaagatgattgaactgataatgagtgagataatggatcatgggcctcctctgaactgggatgatattgccgggcttgagtttgctaaaacaaccatcaaagaaatagtggtgtggccaatgcttaggccagatatttttactggcttgcgaggacccccaaaaggaattcttctttttggtccaccaggaacaggaaaaactctgataggcaagtgtattgcttgtcagtcgggtgccacatttttcagcataagtgcatcatcattgacttccaaatgggttggagaaggtgaaaaaatggttcgagccctctttacagtggcaaggtgtcaccagccagctgtgatattcattgatgaaatagattctctgttatcccagcgtggtgaaggggagcatgaatcgtcaaggaggattaaaacagagtttttagttcaacttgatggtgctacgacatcttcagaagatcgcatactggttgttggtgctactaaccgcccccaagaaattgatgaggcagctcgtagaagacttgttaaaagactctatattcctcttcctgaagcgtctgcaaggaagcaaattgttgtcagtctaatgtcaaaagagcattgtagtctcacagaacaagaggtagaggccatcgttttgcaggctgatggtttctcaggtgcagatatgactcagctttgccgggaagctgcacttggtcctatacgcagtatacagctaatggatatttcaaccataacagccgaacaagtccgccctattgcttatattgatttccaaagtgcttttctggtagtgcggcctagtgtttcacaaaaagacttggaattatacgagaactggaacaaaacatttggttgcggcaggtgacgtgctgctgttccttttagaattattttgtcataaaataaatgtgagattagctgatttcaacagcatgtccctgcaaatacccgtattgtgttcatttacccacatagatttttcccagcttattaaaattaatcataccaaggtctacaggtctgctctacatgacctgagatacggtatcacttttacatgaataaataggtctgaagttgaaataaaaaaaaaaaaaaaaaaaaaaaaaaaaaaaaaaaaaaaaaaaaaaaaaaaaaaaaaaaaaaaaaaaaaaaaaaaaaaaaaaaaaaaaa

SEQ ID NO: 345 - DNA, 1591 bp, Xenopus laevis
aataggccatgtctggaagaggtaaacaaggaggcaagactcgtgctaaggcaaagactcgctcatctcgggccgggctgcagtttccagtcggccgtgttcacaggctcttgaggaagggcaattatgccgagcgggtgggagccggagctccggtctatctcgccgcagtgctcgagtacctgaccgctgagatcctggagttggccggcaacgctgcccgggataacaagaagacccgcatcatccccaggcacctgcagctcgctgtgcgcaacgatgaggagctcaacaaactgctcggaggagtcactatcgctcagggcggggtcctgcccaacatccagtccgtgctgctgcccaagaaaaccgagagctccaagccggccaagagcaagtgaagtgcccgctcccagcgcccccattagggaacaacacaaaggctcttttcagagccgtccccacaccggctaaagagaactgtgccacacgccccttatttctactcccaagtgatattgtgcctgctgtggttccaatacggctcatagatccgcccctgtgtggctgcagggtcaccaagccggtgtcattcacttgaaaaaacgaaccccccgcgcagttcgtttttttgtttttttccgttattttggcggaccaacggaaaactgttaagtgacgtatgtccatagtgaaccaatgacaaaggagaacaggctgaaattagggcaggcagttataacggtgtaaaatcgcctttggtccacagtaaaataactatagtaagtgagccgggcatcaaggaggcgccacttaatgtgctattgatgggcgatatttcgtattacatggcgggagggcagcagaatgggccagacacagaatttttcgttggctgttgtaacggtgcgggaacctccagaaagcatcgcgaccaactccttttaaatttagcgcaggaaaaggctacgtgtcacgggactgagccgctgctgataatgtgcgtagggagaggcccctttagaggagacattttgtgtatgaaataaaaacgtagcggtgccttatgtactcatttagatatagaagaatggtgcttggcggagacttctaggatccacgaaaagtagcctaatgttgtaggcaattgtgagtgatacatggtgcggcttttacacggtgctaaatatgaatattctctttcaaaacagcccctccatcggagctcccgataggtgttgtttgctcccggtctgcgtgtcaaatgaggggtgggcgtgtcctaacggtcccggccagaagcccagtaggagggggacagccaatcacagccctgtagtcaaacacaagcacagacaggcttcagttccctgtcaggtcctgctagctgctgattggttcctgtcctacagcacagtgagccgagaacacagcctgggaatacagggagaaggaagtgggagagaaagggagtattagggtttttacagaaatagatccgttgatgcacaaaggaagtgccagtaacgttccttatcccctgcacctgcttcagtctacaataataaaaaaaagaaaaaaaaaaaaaaaa

SEQ ID NO: 346 - DNA, 2141 bp, Xenopus laevis
acatttccttactatggagagctcttacctcttagggcaccacacgcttacagccctcaagaaatcagagagatattgagattggcacattgctttaatttagaagtcattcccctggtgcaaacatttgggcacatggagttcgtactgaagcacggggtattctctcacctgagagaggttgagggctttacaaacaccctgaacccacacaaagaacaatctctgcagctggttcaagccatgattggccaagtgatggagttacaccctgatgcccgctggctgcacattggctctgatgaggtgtatttcctcggagagggcagagagtccaaggaaatcatagccaatacccaaatcacagtacaggaaatctttttacaccatctgaaggctgtgacttcacacgtggcctcagcttactcaggggtccgacccatagcttgggatgacatgcttcgtgatgctaacgaacaagtgctgacagagtcaggtgtgacacatctgttggaactgatgatatgggactacagtccagacctggacgttgacaaaaaagttgctatggtggctaaatacaagcagtgcggtttccagaagttatggttcgcaagtgctttcaagggggccactggagtcaaggaacagctcaccagtatcaatcatcaccttggaaacaacaaccagtggctaaaagtggcagcaaagataccacaggagttgctacagggaatagcgctaacaggctggcagaggtacgaccacttctcagttctgtgtgagcttctgcctgtggctattccttgtgtggccgtgtgcctgcagtttctgaagcatggtgaatattctgaccaggtgatagagcaagtcaaaagctttctgggaatgacagaactggaaaatttgggaagcatctcaagtggctcattcccgggcaacaaggtcctctcccttgtcactcagctcatctgtaacttaaggccagaactgaaggagttactggaagagaacaagtttgttggcggctggtttagcccataccacaggaggacaaatgtaattaaccctgtaatggtgcaggagatccagccagccaccatgagcctcatgtcccgatggcagacactacacgaagaactgcaaaacgagctgctgcaaatctatccctctagcacggtagtagaatggatggaggtgaatgtcctaccctggtacctccagattaagaaactgtgtgaagatttaaatgctgcgctgcagaatcccctgtagcatccttgcttcataatcacataatgccttcttatgttaattccacgctacatccgattgggagagaaaagggccgagtcacatgacttgttaggggtttctttgtatttaaaatcaaggcaacaaagagtagcataaatgaggccctaaagcctttgcactagtacctgtagcaggaggcccatatgttcttcagtcaagccctctcttccggcatttgcactttaattctatgtccctcttctggttttattttatttatattgtatgcatggataactttatttgtaaagtgctgttaaggagccgcagtgcagtacaatatataaaagtacacacagggaggacaaatattgttgatttttagttaaagtccccattataaactgtggattacaatgtgaatgctgttattgctcagcaatatgtccaactagctttttttttttctttttcaagatctgaaataattttatactttgtatattttgcgttccataacggacacttttgtgttcaagtaatgaaccagctttttatatgctaaaacccctctgtgggttgcagtatctttggtttgaattctgaatgcctctttggtttgaattctgaatgcctcttttattttaatcacctgcacgacatgagtattatatgcattttaagaggccacagggacgactcaaatacttgtacagacctcattgggcgaaatacccgatgaaggccttcgtagtgctgaaacatggtcaccggagtttatagcactagttaaggttatgtatgatttttgtatgctgttgaataaagatttatattgttgaataagaaaaaaaaaaaaaaaaaaaaaaaaaaaaaaaaaaaaa

SEQ ID NO: 347 - DNA, 3804 bp, Xenopus laevis
ccaagcgctgcgctccctcctcccttccctctcttttttttttcactccccttccttccccgggaacgccatggaggccaactggaccgctttcttgtttcaggctcatgatgccactcatcatcatcaccaccaccaccatcatcagcaacaggcagcccaaaatagcctgctaccacttttgggttctcctgttgagccccctgatcagaaaccaatgttacctttgccagtaacacaaaaacctcagacacaggcagaacctttaaaggaacctgtagtagtgaagaaggaaaagcccaaaacttcatttatatgcacatactgcagtaaagctttcagggacagctaccatttgaggcgccatgagtcctgccatacaggaattaaattggtgtcacggccaaagaaagcccagatggccccggtcgtaccccttatttcaactattgctggagacaataacagaacatcattagtgtccacaattgccgggatcctgtccacagttaccacttcatcatctaccacagtacctactgccagtcctagtatccctcctatgcctgttgcaccaccagtaaagaagcctagcaagcctgtcaagaagaatcatgcttgtgagatgtgtgggaaagcattcagggatgtttaccatctcaacaggcacaaattgtctcactcagatgaaaagccctttgaatgtcccgtatgcaatcagcgtttcaaaagaaaagatcgcatgacttatcatgttcgatctcatgaaggtggaatcacaaaaccctacacatgtagtgtttgtggaaaaggtttctctaggcctgatcatttaagttgtcatgtgaagcatgttcactccacagaacggcccttcaaatgccaaacttgcgctgctgcctttgccacaaaagatagacttcgaacacacatggttcgccatgaaggaaaagtttcttgtaatatttgtggcaaacttctcagtgcagcatacatcaccagtcacctaaaaacacatgggcaaagccaaagtatcaactgtaatacctgtaagcaaggtaaaaagtttcaagggcaactccatgaacttcaaactcctgttcattgtcgaatcaaatatgaagctccagactcactcttttgtgctgtggatcagaatcataggacattttcaatagatacaagcaatttgtgccaaacgtctactacgtcccagacacctgttacacttacatctcccttcaatatcacatcttccattgcagcatctggaaccctcacaaaccctgtaactgtggcagctgccatgagcatgagaagtcaagtgaatgtttcaagtcctgtcaacattacttctccaatgaatctgggtcatcctgttacaattacaactccaatttctatgacctctcccttgtccttaacttcacctgtaaatttgcctacacaagtttctgctcctgtgaatatagcacatccagttactataacaagccctatgaatctgcccacaccaatgacgttagcgggccagttaaatatagctatgagaccagtggaaagcatgcaatttttgtctcaagcgctgccatcttcaccgccttggtaaagaacactcaccacagtattaaaaagttgtaccgtagatatctaccagcagctttcagtaatgtctttgaaaaggtcgcagaaatgcttgctgacccttgagtttagccaatttcatttgtccttcagccttcatatttattgtccaggaacatgccaattaatagaggggatcagaatagggaaaatgaagaaaagtatagtgtagaagactgttttatgcttgaagtcatagcaaacattgtattaagattttaacctgaaatcttgggcctttttgaaagaaaacgataacactagcaaccaatatcttaattttattctcataactttgaacaaattctagtgcagtctctatcatgcttctcaacggtttgtgttctctgtattcgtacgtcgtagaacataaaattatctgagagtctgcacttcactgtggaaatttgtttaatataagcagcatttcctatggaaaagcaaaatgatctgcaaagaatagattttgccattgtgattatatgtgacacagatcagggctagaaacgttgagtccactctcatggaataagttaaaacattaaatgaattatttcatctacaacccctgactagtacaaggtaaatttaggtgctatattttcagccctgatagactttaatttgatattgggcaatgtaaatattattaaacatataaccagaagggagtattagcattctagttatttttataattatttttaactgtttttgttttgggtgaagaacaaaagtactggggcatctatatttctagcctgcggagaccaggatgaaactgagaaacctcttccagaatgcattttgttaccttcacgggggcttggcatgtgttaaaggcttctcaaagcaccttgactctccatttcagtgtggattgtacagctacacgacaaacgcaaaaggaagcgccttccatgcagaaaacttcacccaatggatgtggtagaatcatatctattaaccaagctgatcagttcccctccccaatttttgtcgttataatggcgtacaaatttatgttgaacaaggacatgtgttctatttaaatccatatatagtttttttaaccactgactataaaaggccctgtatgacaagccaagagaatcattgtttttgcttgtggtttttttctctattcttgtatgtcgttttttttgttttgtttttttaaagatttcttatgtgttgtagaaatctggttttaatatgtaaatattttagcttttttttatattcaacatcccaattcttgctatttttctttgtttttcatggagacagtgggatacaatccattctggaatgtccccaatagcacttgcttattggacagataacacgcacacataagcagagacacctatccattgctatttgtctttttttttgtttttaacccccccaatcctaattattaactatactgtagaaagaaccaaacaaaagtgtttaactgcttttttttagaccatcatgtaacattaacttttgtttatttaagttgtgttcagatctttatttgctgtaatggctagcagacatgcttttcaaacaattgtttgcagcctttcccagctaatgagaagttacttaataggcaacgactctacattttacggaaaaaaagtgtattccactgaacagaatctaaggctattttttatttatacattgcagcccatttctttgctggagaaatgaattgcacctctagcattgaaagggattgtactgctcagttaaaagtatttaaaaatgtctgtctgttccaccaagtcagaggaaatggcatgctttattagaaaaatggacaaacctctccaagaagagttgtttgaattgataaatacacaaaacgctctagggggcttaatatgtatacaataaaatagacttcagtgtgtaaagaaaattcattttataactgatctttttgtattgtaggacattaaattgtacatcttttgtatataaaagattaggaaactttctgtgtagcagaaagcaaacacattcctacacttttactgtatatgtttgttataatgtccatgtaaacatatgccccgtgttcgtgcctttttaattagtttgtctcaataaacacaatgtagagaaaaaaaaaaaaaaaaaaaaaaaaaaaaaaaaaaa

SEQ ID NO: 348 - DNA, 1714 bp, Xenopus laevis
gaagcggcggggacggagagctcgtttacgactgtttcccggtgtcggtttgtacagagcggctgcagacatgtccctgcacgggaaacggaaggagatttataagtacgaggcgccatggaccgtctatgcgatgaactggagcgtgaggccggacaagaggttccgcttggcgttggggagttttgtggaggaatataacaataaggtgcagctggtaggactggatgaggagagctctgagttcatctgcaggaacacattcgatcacccgtatcccacgaccaaacttatgtggatccccgacaccaaaggagtttatccggatctgctagcgactagcggggactacctgcgcatctggagggtcggggagaccgagacccgtctagagtgtctgctgaacaacaacaagaactcggatttctgtgcccccctcacctcttttgattggaatgaagtcgatcccaacctgctgggtacctcgagtattgacacgacctgcacaatctggggtctggagacgggacaggtccttgggagagttaatctggtgtcgggacatgtgaaaacgcagctcattgcccacgacaaagaggtgtatgacatcgcattcagccgtgccggagggggtcgagacatgtttgcttcagtgggggccgacggctccgtgcgaatgtttgacttgcggcacctggagcacagcacgatcatctacgaggacccccagcatcacccactacttcgactgtgttggaacaagcaggaccccaactatctggccaccatggctatggatggaatggaagtggtcatcttggatgtacgagtgccctgcaccccagtagcccgactcaacaaccaccgggcttgtgtcaacggcattgcatgggccccacattcatcctgccacatctgtactgcagcggatgatcatcaggccctaatctgggacattcagcagatgccaagagccatcgaggaccccatattggcctacacagccgagggtgaaatcaacaacgtgcagtgggctagtacccagcctgactggattgccatttgttataacaactgcctggagatcctgcgagtttgactttatttattgcttctagcccactcctcctcctcctgcccctttactacaggatcttccgcacctcgagcccctcactttttatacatccggactcattggctctccttcctctcattggtctaagccagaagatccttgttatattccaggagctcattggctctcctctctcattggtctacgccagaagatcctcattatattccaggatctcattggctctccttcctctcattggtctacgccagaagatcctcattatactccagaatctcattggctctccttcctctcattggtctacgccagaagatcctcattatactccaggatgtcattggctctccttcctctcattggtctacgccagaagatcctcattatactccaggagctcattggctctccttcctctcattggtctacaccagaagatcctcattatactccaggagctcattggctctcactactaaacgttattgtccagattaactgagtccgtctgtctgtttttacagtatatgatgcaactcttttacatgaaggaattagtgctgcttagtaaatcagcccctgctttctaaccgacattataaaaaaaaaaaaaaa

SEQ ID NO: 349 - DNA, 2022 bp, Xenopus laevis
ggagcagaggaaacatgtgcgggaggcagcggggatgggaataggcagcaggcgaactggattatccgacccccgtctgctccgaccccactctcacatgcaccggcccccgggctgagccggaatcaagaccctttctcttgtggtggagtctgttcttctttatttccactggctgatcgggaatcccaagaagcgcgaccaactgcaccaggagcaaaagtctgtacctgtgatcggctcacttgttctgagaggctgctacgagctccagccatgaacgcaatagtgttcaacaagctcagcggccaagtcctctttgaggaatcagctaacgatcgggagaggggagtccgaccctacctgggagtaatggagagtccaaatcctgatgtggggttacaggatggagtttccataaaggacaatgcgagtctccgacaccggcgccctggaagctccaggggcagcggtaaagttcgacacaagcgccaggctctgcaagatatggcacgtccgctcaagcagtggctctacaaacacagagataacccctaccccaccaagaccgagaaaattctgctggcccttgggtctcagatgactctggtacaggtttcaaactggtttgcaaatgcaagacgacgccttaaaaatactgtgagacaaccagacctgagctgggctttacggataaaattgtataataaatatgtccaagggaatgctgaacggttaagtgttagcagtgaagactcctgttctgaagatggggaacatgtcccaagaagccacaataatgaagaagcctatgacaagcctatgcaccatactgtgattaccaaagaaagctcggtcatcaaatcgggtgtaagagcagagtcaagtgccagtgaagattatgtttcccctccaaaatacaagagcagtttgctgcatcgctatctcaatgactctttgcgacacgtcatggccagtaatgcagcaatgagagaaaaaacgagacagaggaaccactcagggtcatttagctccaatgagtttgaagaagagcttgtatccccatcatcttcagaaactgaaggcaactttgtttaccgaacagatatgttggagtctgccgcaaataaatgccaaagtatccctttaaaaaacacctcttcctctggcacggaaggcagggctgtattcaccgagggaggtctctgcagtcaaatttggaggatcagacctgctgcaattctttcatgtgcaggacagggtgcaacgtacacaaaacatgtgcagttaataaagaaggagccagcaaagatgaaacgtactggagggagattaatgcagccatggccttaacgaaccttgcccaagggaaagataaactgcagggaacgacaagctgcatcattcagaaatcctcgcatatatcggaagtgaagactgttaaagtggcgctgcttcagaaatactaacctgaggtttttcagacttgcctataaaccggcgacggaaccctcaggagtttgtcccagtcctctgaagcctgttctgctttggaacgatgaatattctggttgctaaacatcaagatctacaaagtcttggactcagataccggacgctgccggacatgtacattttaatgccgtatccgtttttttttttgtttttttaaaggaacaaataacttattttatccgtcagcacaaatattcagctgataagtaagaattgcttctgccatatgtgccttgccaataaaaaataagctacaacgtgggcatgagatacaatagttatgccttaatttatgaatgccataaagctttttatattttatctggagttaaatctgcttggactgcaaacaagttgatatttgcagctgattggaaagtgcatgagatatcatgttgccatttgaacctgaccgtatattttacagtattttggacctttccttttttggttttccaatcaagggtttcattcataaattgatgaaaaataaaaaaaaaaaaaaaa

SEQ ID NO: 350 - DNA, 773 bp, Xenopus laevis
gtcaccgcgcattcggtttacgctacttccgtctaatgccggtgggctgagacagtgacgtgtacacatcgggagctctcagttccgactcgggcaagacctagaagaaacagaatgtcagaaggagatagcatcggtgattcggttcatggaaaaccttcagtggtgtttcggttcttttcaaggcttggacaaatttaccaatcgtttctagacaaatccacaccatacacagcagtacgatgggtgatgacactgggccttagtgcaatctacatgataagggtgtatatactacagggttggtacatagtgacatatgccatgggtatttaccacctaaatctattcatagcattcttatctccaaaggtagatccatccctaatggaagactcagatgagggaccttcattacctactaaacaaaatgaagagtttcggccatttatcagaagactgcctgaatttaaattttggcattctgcaacgaaaggagttgttgttgcaatgggatgcactttctttgatgcttttaatgttcccgtattttggcccatcctcgttatgtattttatcatgcttttttgcatcactatgaaaagacagataaagcacatgataaaatacaggtatatacccttcacacatggcaagaggaagtacaaaggaaaggaggaacccacatccgggaagccgttctccagttaaaagaaactgtctcatttttgactttcttacataaaatttaaatcaacaaaaaaaaaaaaaaa

SEQ ID NO: 351 - DNA, 3791 bp, Xenopus laevis
cagaggattgctgggtgtactcacattgtattattccctgctggatagaatcttgttgcttttgatgggtgaagcgcaaaaggatggacaccgggcattactcaatccaggagaggaaaatgaaatggacatatttggatacaggactcacatttgccgaaaagttctttgtattattgggtacatgttctcattggggttcctcctgcttttattctactggaagccagaatggaatgtgtgggccaactgtgttccatgttctcttgaggaagcaagtgttgtgctgctccgaacaacagatgaatttaaacagacctcatggaaaaaggtgaagtggatccaactttcctctaaagatttcattgcttacggtgcagctaccaaagacacagattcaaccgttaacaaggcaataataaagccagagcttaaagtgcgatacatacaggttcagaaaatccgttacatttgggataacagtgaaaaactatttacaaaagcaggaattcttgaggaccactactcctgtgcatctatacattcaatgtttgagtctggggttgcaagagaggaagaaggtataagaagacatatttgtggacctaatatcattgatgtaggcattattccaatatggaaactactggttaaagaggtcctaaatccattctacgtgttccagctcttcagtgtgtgtctttggtttgccgaagaatatattgaatattcagtggctattatactcatgtcactaatttgcatctttttatcagtgtacacagtacgacagcaatcagtaaaactccacaaactagttgaatctcataacaatatcacagtttcagtatatggagaagatagagggatatttgagttggaatctcggcatttagctcctggcgacattcttgtgatacaaagaaacacccttttaccgtgtgacgctcttctcattaaaggaggatgtatagttaatgaaagtatgcttacaggtgagagtattccagtgaccaagactcccctgcctaacacagataatactgagccatggaaagttcacagcatacatgattacaaacggcacattcttttctgtggaactcaagtcatccaggttaaagcgtctcataatagcccagtgaaagctgttgtattgagaacagggtttaacactgccaaaggtgatcttgtgagatccatcctctaccctaaacctgtgaattataagctgttccgagacgctgtcatatttctttgcacacttattggaactgcccttattggaatgatctatgcagtctgtgtattttctctatctggggttgccgctggcgaggtggtactgaaggctctcgatgttatcaccattgcagttcctcctgcacttcctgccgcactcactgcagggatcatgtatgctcagagaagacttgagaaagcaggaatcttctgtatcagtccacaaaggatcaacctgtgtggaatgctaaaccttttctgttttgataagactggaaccttaacagaagatgggttggatctttggggtgtagttcctgccagtggatacagattccagaatgtaataatgctatcgtcagacctgagtcttccatggggtccactctttggagttatggcaacatgtcactccctaatcgttctagatggcagtgtacaaggagacccactggaccagaaaatgtttgagtctacctgctggatacttgaagatcaacaggaagataacatgacagagaatacgccacaacgaatagtaaaacctggccataatacgagcagtgatgctattgaaggcattcttattctacagcagttcccattctcctcttcactgcagagaatgtctgtaattacacaagtactgaatggtgatgaatatgcaatatacgtgaagggtgctccagagatggtggcttcattctgcaaaacagaatctgttccaataaacttttctgatgaactggagttttacaccaagcaaggcttcagagtcattgggttagcatataagatattggacatgaatgatcccaaaaaagtgatcacgctaaagagggaagaagtggagtcagatctcattttccttggattgctagtgctggagaaccgattaaaattagagacaaggccagtcttgaaagagcttaaccgtgccaagatcagatctgttatgatcacaggagacaatcttcagacagctgtcaccgttgctaagaactctggaatgataagtgaaggcagcaatgtcattttgattgaggccaaggaaccaagtgggtctgacttggccaccatcacatggacattagtggaaggcacaaaacctaaaaattctgacatcatggatatttgtatcagcatggaagagctatctaaacctgcagatgaaaaacttcattaccattttgcaatgactggaagtacataccaagttataattcaacatttcaacaatttgttacaaaagattctaatacatggaacagtttttgcccgtatgtctccagggcaaaaatctaatcttgttgaagaatttcaaaaattgggttactctgttggcatgtgtggtgatggtgccaatgactgtggcgctttgaaaatggcacatgttggaatttccttatctgaacaagaagcttctgttgcgtcaccatttacatcaaacaccccaaatatcgagtgtgttccatgtttaataaaggaagggagagctgctttagtcacgtcattctgtgtgttcaaatacatggctctttatagtatgattcagtacataggagttctgctgctctactggcaacagacaacatatgccaattatcagtttctattccaggatctggctttaaccactgtaatcagtgttacaatgagtttgaatcatgcatatcccaagctttcttcatataagccacctgctcagctcatctctcctcccctgctgctttctgtgttgattaatatcatcttaagtctaattctgcaagtatgtggcttcatcattgttcagaaacagcaatggtacatttctggcctcagctccatttatagtgcctgtctcccaagaaataacagcgattcaaacagtctgcttataagcaataacactaacctgacaactagcgacaattcagccaaaatctctgaattccaaacctatgaaaataccacaatctggctgttggccactttaaattgtctgattgtagcccttgtagtctcaaaaggaaagccattcagacagcctttatataccaactatatatttataattgtgatcgctgtccagtttgcagtttgtatatttttttgtttgccgatattcagaatctttacaaggctttggacctggtctgcactcctctcatatggagaggagctattggaatcatgctgctcatcacattggcagtgtcttacattgcagaggaagctatcattgaaaatagatcactgtggaatgcaatgaaaaaaatcttccattataaatcgaaaagtccttacaagaggctacagcgcttgttaaagaaagatgcagagtggcctccactcaacagaaaagactatgctgaggaaaggggatactacgtcaatccaacttttgaaagcaatgaacacagctgacatggataaacagaaaatgtgtatttttgatcggatttgtttaaaaatatttgtgtgttctatattttggactgtgattttagtttttgataaattttatattgtaataaattttgctaaatgtaaaaaaaaaaaaaaaa

SEQ ID NO: 352 - DNA, 1245 bp, Xenopus laevis
gtaggcagaagggaagaaggtagagcctgtatcatggcggatagagacagtggaagcgagcaaggcggagcggcaatgagttccggcgctagttcgctacacccggcgtcaggagcaggcggctcagtccttcagcacgaaacgcaagaactggcgtctaagcgcgtcgacatccagaacaagcgcttctatctggacgtaaagcagaacgctaagggccgcttcctgaagatagcggaggtcggggccggcggcaacaagagtcgcctgacgctgtccatgtccgtggccgtggaattccgcgactacctgggagacttcatcgagcattacgcccagttgggacccagcaacccggacgtggcgcaggacgagcccaggcgggcgctaaagagtgaatttttagtccgagagaaccgtaaatactacatggatctcaaagagaaccagcggggccgattcctgaggattcgccagaccgtcaaccgcgggcccggcttgggatcgacccagggtcaaaccatcgctctcccggcgcagggactcattgaattccgcgacgctctcgccaaactcatcgacgattacggagtggacgaggaaccggcggaattacccgagggcacttcattgactgtggacaacaagcgctttttttttgacgtgggctccaacaagtacggggtgttcatgagggtgagcgaagtcaaacccacctaccgcaactctatcaccgtccccttcaaagtctggggcaaattcggccacacgttctgcaaatactccgacgagatgaagaagatccaagagaaacagcgggacaagcgagcctcggagcaaccacagcaacaacaagagggggacgacggggaggacgattgataaccggcccttcattccccacaatccctcctcctcctcctccttccttcctcctttatgaacttgcaaaaagagaaaaaaatatatataataataataataataataataaactgtttaactcagagggagcaccgcccaccgccgatcctccacaaaaactgacagtttgtgacttgtctcctccccttcctccccccccatcatcgctggatgttgtccactcacccaccgtataaacagtaagcagctgctaaaaaaaaaaacaaaacagagagagagagagaaaagtaataacattatatatgaactgtgtttcctacttgattaaaatgtaaaaaaaaaaacaaaaaaaaaaaaaaa

SEQ ID NO: 353 - DNA, 1108 bp, Xenopus laevis
ggggttccaggaatctggacttctaaacaccttgcgttgtgtctgagaataaccaaaaatgactaattatgcacgaggctttggagaatatgactctgattttagtgacgaagatgatggcaaagaaaaagatgctgacagaagcaggttaaagaaggatgaagcattacttaagaagccctttcagaaagacagacatgtaaaggttgctcacaaaaaggttgccgctgatgaatgggacagggaagaagcaagaaatcgaagagtccacttaatatccatggatgcttttgccagacaccagaaatatgtcaacgattacattttgtactatggtggaaaactgcaagatttccagcattcaaaagaaagtaataaaacagatttggatgtcattagagaaaaccacagattcctgtgggaggaagaagatgaggacgacatgacttgggagaagaaacttgcaaagaaatactatgataaattgttcaaagaatattgcatagcagatcttagcagatacaaggaaaacaagtttgggtttcgatggcgagtggaaaaagaagttatcgctggaaaaggtcaattttcctgtggaaacaagcgctgtgacgaaaaagaaggccttaagagttgggaggtgaattttggatacgaggaacatggagaaaagagaaatgccctggtgaaattaaggctttgtcctgaatgctcgtgcagactcaatttccatcacaggaggcgagaaattcagccgactactaaaaaaaggaaagcaaaaacagagagagaagaatcctctagaaaaaagaagaaaacatcccattctcaaaagaacacaaacactaaagaccatcctacagaaaaacatacaaactccagtgaaacagattcttcagacacagatgggggtgaaggaggagatgacaaaacagacagtgaattctggaaaggtgccacccatgaaacagatgaaaaaacccgggaagaagaatttgatgactactttcaggatatgtttctgtaattggaataaagaagacctttttattaaaaaaaaaaaaaaaaaaaaaaaaaaaaaaaaaaaaaaaaaaaaaaaaaaaaaaaa

SEQ ID NO: 354 - DNA, 2013 bp, Xenopus laevis
cgaagcttcgtctcgcagcttttgtgctttcttttcctttcccttaactgctggttattttcgcctccgcttttgtatcctttctccgcaatctgcagaacttctctgggaaatgcgtcagtaaatccgcaactcataaagagacgtcagctgcgcagtaccattggcttttatagtctccagagcgctaagaacaatgtgccggggggccctgaccgggctgctcctagtcctgtgcctgagtgcactgctacgtgcagccccttctgcaacaaacaagaagcgcagacaggcgcagcagcagcaagaaatacaaccccaaggaacgcaggacaaccaacagaaaggatgttatgacaatggaaagtactatcaaatcaaccagcaatgggagcgcacttacctggggaacacactggtgtgtacctgttatggtggagggagagttttcaactgtgaaagcaaaccagagtctgaagagacctgctttgataaatacactggtgtttcttaccgggtcggtgaaacatatgagcgtccaaaggataacatgatctgggactgtacctgtattggagctgggagggggcgcatcagttgtacaattgcaaatcgttgcctctcaggaaagcggccactgggattctaccaattcccccttttggtttcaccggggctccccctcctcttcatcgccttgatcaccactcccctgtcccctcccttcactcctctgcgccccctcccgtcgctcgggcttcactcgcagctcccggccactgccaccaaccaccgcctgcatgtgaagcacccaggggccggggaggggaagaccatgctgtgaggggagccggtcctgcttctccgtctgcagcgcccaggtcagtgtacaaagtccatgaaatgacgcagggaagagaaatatggagctgaattcaagacatatctatggaaatccactttgagcttatttttaattccttaacatgaactcttcatagaattagatttttgttttttcattatttgaagagataacaagcctccactggaattcttaacagttgcatttacttgcctttacgaaaggatttactgcaatcaatatggctaataattcagttgcatatagtggtgttaaaaactctctaaatgaagcaaaccatgggggagaatttggcatcacacttgaagaccttcgtacgcttatggaattgagatcgacggatgctttacaaaaaatacaggagtgctatggtgatgtgtatggaatttgttctaggttgaaaacctctccacatgaaggtttaagcgggaatccagctgaccttgaaaggaggcaagaaacatttgggaagaatcttatacctcctaaaaagccaaaaacatttcttcagttagtatgggaagcactacaagatgtaacattaattattttagaaatagcagccataatctctttaggcctttctttttaccgacctcctggtggagaaaatgaagcgtgtggtcaagctagtggtgctgtggaggaagaagaaggggaagcaggctggatcgaaggagctgctatccttctatctgttgtatgtgtagtcttagtaacagctttcaatgactggagcaaagaaaagcagtttaggggcttgcagaaccggatcgaacaagagcagaaatttacagttgttcgtggagggcaagttattcaaatccccgtggctgacatagttgttggagatattgcacaaattaaatacggtgatctcctgcctgctgatggagtgctcattcaaggaaatgatctaaaaatcgatgaaagttcattaactggagaatctgatcacgtaaagaaaacgctggaaaaagatcctttgctgctttcaggaacacatgttatggaggggtctggaaaaatggtggtcactgccattggtgtgaattcccaaactggaatcatatttactttacttggagctggagaaaatgaagaagagaaggaaaaaaaaaaaaaaa

SEQ ID NO: 355 - DNA, 2402 bp, Xenopus laevis
  modified_base (2224)..(2224): a, c, t, g, unknown or other
tctattcctccctatacagaggaagcagcgctgcagccgggagtattcttacttgacttccctccagttgtacgatcatgaggcgactagtcgtacttctatttctgggggcattcctggcatctgtacaacctgagctcgatccactatccctggaggaactgggctcggacatcggaattcaagtgtttaaccaggtggtcaagaccaggccgcatgaaaatattgtaatgtcaccacatggaatctcttccgtgctgggcatgctgcagctaggggcagatgggaagactaagaagcaattgatgaccgtcatgcggtataaaatcaatgaggttgccaaaagcctaaagaagattaacagggccatcgttgcaaagaagaataaggatattgtgactactgcaaacggagtgtttgccagcagcgcgttcaaaatggagggttcctttgtctacaagaataaagatgtctttcacagtgatgtcagaagtgttgactttcaggagaagaacacagctgcttccattatcaaccagtgggtgaaaaaccagactaaggggatgatagaaggactgatctcacctgagctgttggacagttctgttacacggctggtgctggttaatgctctgtattttaaggggctctggaaatcccgtttccagccagaaaacacaaagaaacgcacctttcatggaccagatgggaaagactatcaagtgccaatgttggcccagctgtccctgttcagaagtggatctgcaagtacacccaatgggctttggtacaatgtcattgaacttccttaccacggaggaagccttagcatgttagtggcattgcccacagaggagagcacccctttatctgccatcattccccacattagtactaaaaccttgcagagctggatgactatgactcctaagcgggttcagctcatcttaccaaagtttagtgtggaagcagaagctgatctgaaagagcctctgagaaacttgggtatcacagagatgtttgatgtatcaaaagccaactttgcgaagattacaagatcagagagccttcatgtgtcacacctgctccagaaagctaagatagaagtgaatgaggatggtacaaaggcatccggagccacaactgcagttttgatagcaagatcatcgccccgttggtttacagtggacaggccatttttgttttttattcggcataaccctacaggtgctgtgctcttcacagggcagatcaacaagccttgagggggagatgctccgtagtcctgtatcctgattccagtgctagatatttgtacattgccctgtttttttttgtgaattcttatcatttttaaactgaacgtttgactgtatttgtaatgtttttttgttaactttgttttgataatgcagatcgatggtacacttgctaaaaggtggttatttttaactactgagtgtttgtggctttattagagcttttctttttcgttttacattttttaatatatgtaattattccctgaactttctcattatcctgacaaccagttgtgtattaaagcagtgtgctgggtgggccggctgtgtctcggctaagcaacatccaaggcaggagatgatattcctaaatggactttcactgagcctgagaaatatttcctaacgtactttcctaacatagaggccattttgcactaatctataagaaccaatccaaccttctttcattgcctgagtacagtagattcaaacttgcagtgatgagacgtgatccttcacatggggtactttccagctataaaagtaggagtcgctgaccccatcttaaaaacaaatgctctgtaaggctgaacattatttgttgttgctacttttgattgctcgtctttctatttaggcctctcctattcatattcaaatcaaggcatgggtgctagggtactttggaccgtagcaaccaaatttctgaaattgctgaataaaaagctacataactcaaaaaccaaaaataacggaaaccaattgcaaattgtctcagaatatcactttctatgtatactaaaagtgaatttaaaggtgaacaacccatttacagccaggacagctgaagggctacagaattgacacctatattgcaccccatctctatcactgattggctaaaatatgttttcagcattcctgccatacttggagacgcgtggatgccatttttattnccttttgagtcactgcccttgtttaatatgattgtgatgaatgtacccagtttttatattgtgtgtaacaccatgcatgtgttcattgaaataagtaaactaaattaacatttgtatggcattaaagactgcagctctagctccgaggtgcatttcaaatacaaaaaaaaaaaaaaaa

SEQ ID NO: 356 - DNA, 2606 bp, Xenopus laevis
agcggagtcattatctggctgctagatcaggacccacccaaccatggataactctgggaaggaaaaggaggctctgcagctcctggctgaggctgacaagaaggtgaagtcatcccagtcattcttttcagggctctttggtggttcctcaaaaatggaagaagcatgtgaactttatggtcgggctgccaacatgtttaagatggccaagaactggagtgctgctggcaatgccttctgccaggctgcccagatccaccttcaggttcaaagcaagcatgatgcagccactaactttgtggatgctggaaatgcattcaagaaatctgacccccaggaggcgattaactgtctgcttcgagcaattgagatctacactgacatgggaagatttaccattgccgccaaacatcacatttccatagcagagatctacgagtcagagctggttgacatagagaaggcaatagcacattatgagcaagcagcagactactacaagggagaggaatccaacagttcagccaacaagtgtttgttaaaagtcgctacctatgctgcacagctggagcaatatcagaaagctgttgaaatttatgagcaggttggtaccaatgccatggacagcccacttttgaaatacagcgccaaagattattttttcaaagctgccctttgccatttctgcatcgacatgctcaatgccaagttggcactccagaaatatgaggaaatgttcccagctttcactgattcaagggaatgcaaattagttaagaagctcctcgatgctcatgaagagcaaagtgtggacagttacacagatgcggtgaaagaatatgactcaatctcccgcttggaccagtggctgacgaccatgctgttgcgtgtaaaaaagaccatccagggagaagaggaggatttacgttaattcttaaggagggatggctttcctctagatggaaccaactggaggaatatggggagggggaggaggggcacagcttatatcctatttactattactacccaactttccggcaatgcaagttcccacaccctacctatgtgctgtgcattgtggcctgctgttgatgctgtctggttccaagcacagttgtggagtgatgaatgaaagagtttttaaatcatgatcagccagaattacatgtgtataaaagtacatattttagcaattcaccaaacatccacaactacattgcatgtgttagtatgtagtgagtgccataaacgtattggctgttagctgtactagattatctgcttccacccagaaagcacttcgttccagctggaactttctggggggtttgggaaaaggcttatttaaaagcattgcatggattttaggaggtgtggtgcaatttaacccctgttactaatatgactcattgttttctttttcatagatttgttaatgagggagtaaaatggaagagcatttttaacccttctaactttcttaacgcaatggcaccaggatgatacatctctggagatttaattctctgggtgggggatagtgtaaataggaaatgcggcaatagttccttgtcctgcatagtgacaggtgtgtattgcactgcaaggcctttgatttgtgccctgtcgctaaacattttccatttacactcaatgaaggttagatttttccatttccaaattgctatagagccaaacgctgcaaatctccctgtgtgccattagccttattgtgcagagtagtctcacttgtgctgtattttccatactttctactccctgtcctgctgctagatatttttctagttatttgtatagtatgcctgcacaatgtttctcctgtttaaatttgatagataatttaaagtatcgatactggcagaagttaacactcttagtttgtgccacagaaaacattttttttttagaacataaatgctctgaaatacaaaagctttactaccccattaactacaccttgaccaaatggattggtttctgcctcctcctccctcctttttatggtttgcattaatttgagtatgaatcggtatagctaattctaccaaaacaaaatttactgcatcttggcaatgcgggatgtataactataaatacactgctatttatttatcttaagagcttagaaaagatatgtatccagagttaaaagtttatatctgtacaattgatcctttattaaataactaattagcagtcttctccaacgctgtagcatctaactaatgtctcctctaagtagattgcagtagaagctgtcctgttaaatattatttgccgctgccttgtgcatttacatccaacaaaacatagggctggtaaagaaaatagcagaggtatcaggtgacagctttagagagtaatttaatgttaaatgataggttattcttaatttgctacttattggcactttctacctttacatatcactctaaatgttctgtctagattatttgttttgcctcctgaacaggctgtattttagttatgttgtatccaagcctctattgtattgtgaaccatctcatcacacagctaaactgataaataaagcgaatgagttattaaaaaaaaaaaaaaaa

SEQ ID NO: 357 - DNA, 1855 bp, Xenopus laevis
ggaagaaggtttcaatatgtgagagacacaggggaataaagctgcaagaaacaccatggctggagagggtgcgctgcagttttacagagaactccctaaagtggagcttcatgcgcacctgaatggttctataagtacagctaccatgaagaagctgatggcccgcaaaccacatctagatatccacaatgatatgactatgattaacaaagggcagaaaaggacacttgaagaatgttttcagatgtttaaaataatacaccaaatcacagatactgctgaagatattttattggtaacaaaggatgtcattaaagaattcgctgctgatggtgtgaaatatttagaactgcgaagtacacctagggatactcctgctggtttaacaaaacgggcctatgttgagactgtgctcgagggcataaagcagtgtaaagaagagggtctggatatagatgttggattcttgttggctatcgatagaagagggggacccacagctgcaaaggaaactgttaagcttgctgaagatttcttctgttcaagcaatgaactggttctaggtttggacctcagtggtgacccaactgtgggacatggaaaagacttcatggaacctttagacaaagccaggcaatccggcctcaagttggctcttcacttatcagaggtatctaacaccaactttacagtgtctttattattttagactaaccaaataattgtctgaaagatttgaacggtgtattaaacaatcccatccatgccagtatgccaatccccctcccctagttctcatatattttctccccgacccattgttacctgtgatagcattcatcattgtgtgcatttatagttactgtacatgcttagcatggcctacagctccagctttagtaaaataatatgactgtggtctgccacaaattactttaaatactgtctggtgcagcatcccttatacaattgataagccctaaagtgccattattttaagttattataaaatcttaatactcatacattttgtgtatttataacatacctttggtcttctctatatatcactagagaagacatagattagttcctgacaaaacagaggtcttcacaatacagtttttttggttaagttgtgacaccaagaggtagatgagagtatcaccactcttattcttaaaacttaatgttttccttgaaaagacacatctacagagaaaccccaaaaacatctgttgtgttttgttccagattcccagtcaagcagatgagaccgaactccttcttgcactcccaccagatcggattggacacggcacgtttcttactacctccgctcacgttgttgagattgtgaaaaaacagcgtatacctctagaactctgcattacctcaaatatcaaaggacagaccgtttccacctaccacgagcaccattttggattttggtataatctgcatcacccatttgtgctatgtatgataaaggagtctttgcgacggatctttcagtggagtatgagatcgctgctaagacatttaacttgactccacaccacatatgggatctgtcctatcaagccattgattacagctttgcatcagcagacgtcaaagcgaacttgaaggagaagtggatgctgctaaagccagatgtgttcaaacatacactttaaaagcaagctgaataattagagaatgtatttagatcaccgtccatatggcagaaaggggcgttgtacatctgccagatgtgattattgggcggaggttcattcccacaatttctttttttattctggttttagtacgctaatataaactatgcatttattctaaaaaaaaaaaaaaa

SEQ ID NO: 358 - DNA, 1759 bp, Xenopus laevis
gagagcgtttaggcagctcttcgtacaaatctacagcctgctagacaccgcggattccccttcactctgacttggtataacccagattgtaactctttctctttgtcggtcggattcctgttcaggtttctttgagagacggacgatggcggctaccgagatagtgcggcagatgggtgaagggtgccgcagccttcctctttcggctcatgtgggatttgacagcctgccggaccaactggttaccaaatcagttaaccatggcttttgttttaacattctctgtgtgggtgagaccggcctcggtaaatctacgttaatggacaccttgtttaacaccaagtttgaaagcgagcccaattcacattcacaacctggggtgcagctaaaatccagcacatatgatcttacagagagtaatgtacttctgaaactgacagttgttaactcaattggttttggggaccagattaacaaagaagacagttacaaacctatcgttgagttcattgactcccagtttgaagcctacctacaggaggaactgaaaattaaaagagtccttcataactaccatgactctcgtatccatgcttgtctctattttattgctcccacgggtcattctctgaagtctcttgacctggtaacaatgaagaaactggatagcaaggttaatatcatcccaatcattgctaaatccgatgccatttctaagagtgagttgactaaattcaagattaagatcacaagtgagctggttagcaatggagtacagatctatcagtttcccacagatgatgaaacagtcgctgaaataaacgggacaatgaatgctcacttgccctttgcagtagttggcagtacagaggagacaaaaataggaaacaaaatgatgaaagttcggcagtatccttggggaactgttcaagttgaaaatgaatctcactgtgatttcatcaagctgagagagatgctgatacgggtgaacatggaggatttacgtgaacagacgcacacacatcattatgaactttaccgaaggtgcaaattggaggaaatgggcttcaaagacacagacccagacagcaagccattcagtttacaggagacatatgaagcaaaaagaaatgaatttctgggagaactgcaaaagaaagaagaggagatgaggcagatgtttgtacagagagtaaaggagaaggaagctgagctgaaggaggcagaaaaagagctccatgaaaagtttgaccgcttaaaaaagttacatcaagacgagaagaaaaagctagaagaaaagaaaaaaagcctggatgacgagttgaatgaatttaagaaaaggaagactgccacagagttattgcagtcacaagcacaacaggctgggggctcacagaccttgaaaaaggagaaagagagaaagaattctggtttcctgtaatttcatttgttttggcacttttccatttagcatgttacagtatgcgctccatctgtgttcattccatatccctactgcatgtaaagcatggaaatcatctggggggttatgttctttccattttgctgaagacatcgccaataacctgcttggaaccatactgccaaccatctcctgcctccatccacttgtgtttcctgcatgttttactgacagactcctgtgtatactgaatataatgcatgtcctcttcccatcactgtcatcatatttgaaataaatagtttggtttctctaaaaaaaaaaaaaaaaaaaaaa

SEQ ID NO: 359 - DNA, 1937 bp, Xenopus laevis
ctgccagtaaatgcaggtgctcccagcctcgctctctgctgctacaaagcaaattaaaacgaaaaccatgtttctggtctacaaacattgcactgttgtcctggccatgctctcgacgttggagttttccagctgccttcccttgagcgaagattctatttgtactgcggaggaacttgctaagtatagcatcgtcttcacagggaagtggagccaggctttattccctaagcaatatcccctttacaggcctcctgctcagtggtcatccttgctaggagtcactcacagctccgactaccacatgtggaaaaaactggagcccgtcagcaatggagtgagggactttgtagaaaaaggtgaagcgtggccactaatgaaagaaatagaagcagctggggaaaaaattcaaagtgtgcacggaatcttttctacaggttcaatgtctagtggcacagggcaggcctctactgagtttgaggcacattcaaggcacccctttgtctccttcatggtgagaattgtgccaagccctgattggtttgttggcgttgacactttaaacctttgtgaagggaagcactggaaacaaaccgctacgctggaacttcatccatatgatgccggaacagatagtggatttacattttcatcaccaaattttgctactataccacagggcactgtcactgaggttacagcttcatcaccaagtcatcccgcaaactcattttattatcccagactaaagaacctgccgtccatcgccaaagttgtgttcactaaagtgaaaggaaggctgtcatcatttctcgatatcgtttccaatgtcactacaacaggaaatgaaatcgatgaacatatctcagaaacaccactggactgcgaggtctctgtatggtcatcctggggtctctgtagaggcagctgtgggaacgctggagtgaaaagtagaacaagatacattcgtctgaaacctgctaacaatggaactgcatgcccgaccctcaatgaagataaagaatgtgaaccagaaaactgtgtatagaacaaacaaatgactgggctagataacttatttttaggaatgcaccgaaacaggggcgtaactatagaggaagcagaccctgcggttgcaggggggcctaggagtgtagggggcccagtgagaccctaattaattagcaatattaatatatcttggtaaaataggccaacttataaatattttggggcccgcaattgaatttgctatggggcctagtaacaactagttacaccactgcaccgaaatccaggattttgtttgggattcgggcaggatttggattcggccgaatacttctgcccgaccgtactgaatcctaatttgcgtatgcaaagtggggacagtaagggaaatcgagtgatttgttgtcacaaaacaaggaagtaaaaaatattttttcccttcccacccctggtttgcatatgcaaattgggatttggatcggtgttcggctgaatctttcacgaaggattcagaggttctgccaaatccaaaatagtgttagaagtatggtacgattacttttgtaaataaccgtttaggacaatatatgagatattttatctaaactgacagtttggataaatattcacttagaaaatgaatttatcctcaggccggtgcaatgtggtcagttttgattccaaattccaagttttattttgtattcctttgtgggacaagtaacatttttttttacactttacacctatgttgaacgttttagtgcaaaataagtcattttattacaatgctgtatttgtataaacatattcatgctcacaatattggccaaatgttcaaaataaagattttaaggttttccaaaatgaaaaaaaaaaaaaaaaaaaaaaaaaaaaaaaaaaaaaaaaaaaaaaaaaaaaaaaaa

SEQ ID NO: 360 - DNA, 1590 bp, Xenopus laevis
gattcattcgctgctgctgctgctccactcactaacgggacaggctgaaaggaagcggcagctatgagggaaattgtccatatacaagcggggcagtgcgggaaccagatcggaaccaagttttgggaagtgatcagtgatgagcatggcattgatccagcaggaggatacatcggtgactcagctctgcagcttgagaggattaacgtctatttcaatgaatcatcttctcagaagtatgtgcccagggcagttctggtggatctggaaccaggaaccatggacagtgtgagatcaggccaatttggagagctgttcagaccagacaattttatatttgggcaaactggggcaggaaacaactgggcgaaaggacattacacagaaggcgcagagcttgttgattctgtactggacatagtcaggaaagagtgtgagaactgtgactgtttgcaagggttccaacttactcactctcttggaggaggaacaggttctggtatgggaacactgctgataagcaagatacgagaagaatatccagacaggataatgaacacgtttagtgttatgccatcccctaaagtctctgacactgttgtggagccttacaatgccaccctatccgtacatcagctggtcgagaacactgatgaaacttactgcattgacaatgaagccctctatgatatttgtttccgtacactgaaactgactactcccacctatggggatctgaaccacctcgtgtcttcaactatgagtggggttaccacatcgttacgatttcccgggcaactcaatgctgacctacgcaagttggcagtcaatatggttccatttccacgccttcattttttcatgcctgggtttgcacctttgactgctcgtggaagccagcagtatcgatccctcactgtaccagaactgacacaacagatgtttgatgccaagaacatgatggctgcttgtgatccgcgtcatggacgatatctgactgtagccacagtcttcagaggccccatgtcaatgaaggaagttgacgagcagatgttagccgttcaaaacaaaaatagcagttactttgtggaatggatccccaacaatgtcaaagtagcagtgtgtgacattcctccacgtggcttgaaaatggcctccactttcattggcaacagtacggcaatccaagagttgttcaagaggatctcagagcagttctccgccatgttcagaagaaaggctttcctgcactggttcacaggggaagggatggacgagatggaattcacagaagctgaaagcaacatgaacgaccttgtctcagagtaccagcagtaccaagaagctacagccaatgatggggaggaaatatttgaggaagatgaagaagagattaatgaatagaaataataaatgtgtttgtattgtaagtgtgcagtggtgcagatacagtataaggtgcaacattctgacacattcacagaaatgcaatacagcacgtctgcacaacgtcattactgtgataaataaatgggtcaataaatacatttatttgtaaccaaaaaaaaaaaaaaaaaaaaaaaaaaaaaa

SEQ ID NO: 361 - DNA, 2236 bp, Xenopus laevis
cggacgcgtgggtcggcatttccattgaataaaatgaacctggatcgtctgaggaagcgagtccggcagtacatagagcagcaacaataccaaagtgcactcttttgggcagataaagttgcttcattgtcacatgaagagccacaggatatttattggctggcacaatgtctctacctaactgctcagtatcatagggcatctcatgctttaaggtcacgcaaactggacaaagtacacgaggcatgcagatatcttgcagcacgttgtcattatgctgcaaaagagtaccagcaagctctggatatacttgatatggaagaaccaatcaacaagaaattatttgagaagagtctgaaagaagatctgaaggagccatcaggagaatggcagatgtcacagtcttctatcaaaagctccatttgccttttgcgagggaaaatctatgatgccttagataacagaactttagcaacttacagctacaaagaagccttgaagtttgatgtttactgctttgaagcatttgacctcttaacagcccatcatatgttaacagcacaagaagaaaaagaacttcttgattctctacctcttagtaaaaagtgctcagaagatcaggaattgcttcgtttcctctatgagaacaaattaaaaaagtacaataagccaagtgagactctaattccggaatctgcagatggacttcaggaaaatcttgatgttgttgtatctttagcggaaagacattattacaactgtgactttaaaatgtgctacaaacttacttcagtggttatggaaaaagaccctttccatgcaaattgtttacctgttcatattggcactttagtagaactgaacaaagcaaatgaacttttctatctttcccataaattagtggatttatatccaaacaatcctgtgtcctggtttgcagtgggttgttattatctcatggttggtcacaaaaatgaacatgcccggaggtatctcagcaaagcaactgcattagaacgaagctatggccctgcatggatagcatatggacattcatttgctgtagaaagtgaacatgaccaggctatggctgcatactttacagctgctcagctaatgaaagggtgccatttgccgatgctctatattggattagaatatggcttgaccaataactcaaaactagcagagcgattttttagccaagctttgagtattgctcctgaggacccatttgttatgcatgaagttggggttgtggcatttcaaaatggagactggaagactgctgagaaatggttcttggatgctttagaaaaaatccgagtcattggagatgaggtaactgtggataaatgggagccactgcttaataatctgggtcatgtactaagaaaactgaagaagtatgatgaagccttggagtatcatcggcaagctctggtgcttataccacaaaatgcttccacttactctgccattggatatatacacagcctaatgggaaattttgagagcgctatcgattattttcacactgcccttggtctcaggagagatgatacattttccgttacaatgcttggacactgcatagaaatgtatattggtgactctgacgcctatattggaactgaaattaaagacaagttaaggtgttatgactttgatgtccacacaatgaaaaccctgaaaaatataatttcacccccctgggaagaaagagaatttgattttgaacgtcagtcccttgatgaaagcggcattatggctttggagacttctaatcttctaccaaaatcctctgacaccagatccccaatagaagaagcacttgaaattgaaatgaacgagagtgatatgatgctggaaacctccatgtctgatcacagcacatgagtctagcagttgttcagatatggtcacattgcactgcgcaaggctcctcttgaggataatttccgcttctctgggggaagttatggaagacaaagatacaacttcttaccttaactcgtatcctgatgtgcacagatgactcctctggcaatggaaaacattaagttctcaaagtgtttcccattttactgttaaatataggaagcatacatttcatagttttttttttaacattttaatgtattcatgatcagccattatgattgtataaactatcacaaaataaaccacatgtctaaaggttaagcatgtgaggatcaacaaaaaaaaaaaaaaa

SEQ ID NO: 362 - DNA, 2444 bp, Xenopus laevis
gttcctcttctttaggtgccgtcaccttttctagattttaagatcaaattggccgaaaaaaatccagcaaaaagatcctaaaagatggacgaaatagatgaaatgttcagcaatttgctgggagaaatggatcttctaacacagagtttagaaatagaaacccttccacctccgacacgcagtgcgtcaacaacagagatcaacttctccgttggctttaaagatttaaatgagtcgctcaatgcactggaagacaatgaccttgatgcattaatggccgaattagtggccgatatcactgacgctgaacagaatgttgccacttacaacaacaaaagcacggcaccatttcctcctgcagatgccagcaacagctaccattttcatccaccccccatgcctagtataataacagaagacctatctcttctaccacctcctccagaatttgatccacattatcctcctccacctcctgatcctcttactgagccaaaaacacaggaagaactggagtcaaaggcaaaagctaataaaattaatcttgccctgagcaagatgaaggaagccaaagttaaaaagcggattgttaaggtccatatgattgacagcagcaccaaaaccctgatggtggaagagcatcagacagtgagagatgtgctggataatctgtttgagaaaacccactgtgattgcagcattgagtggtgcttatttgaagtcactcctgaactccagatagagagattcttcgaagaccatgaaaacattgttgaaatcttagcgaactggacaagagacagcgtcaatacgattcattttttggagaagaatgagaaatatgcagtgtttaaaaaaccccagaatttctatatggcaacaaaaggaagtgcagatctgaaggatatgaatgagaagaacaaggtttccctactggagcaaagtttttgtggtgcatctgttactgtgccagagcttgaagcagccctttatttgaaggaagatggcaagaagtcttggaaaaaacgatactttcttcttcgggcttctggaatttattatgtccccaaaggaaaaactaagacatcccgtgacctggcatgcttcgtgcagttcgataatgtgaatgtttattatggcacgcagtacaggatgaaatataaagcccccactgatcactgctttgtcctgaagcatccacaaatacagaaggagtcacagtatattaaatatttgtgctgcgaggatccctggcttctgcatcagtgggttacaggtattagaatagccaagtatgggaagattctgtacgacaactacaaaaccgcagtacagagaggagggctggcgtcccattggtcaactctcggcagttcctcagtttcaacagcagcaggttctagccaaggtaatggtcagatctgccagaacgtaaccaccatcagttccagcttttctgatgcctggaagcacggggaggccaataagcaggaaaaaaagtcaagtgaggttaacaagcctgaaacaaaaagtgcaacacccacagtgaccaagcggccaccccctacacctagaagggcatcatccattagccgtgtgacagatcatccagcttttccacctaaaccaaaggcaataaatactgatatcatgtcaggaccaccacagtttccaccaccagaaccacttcaacctgctgatgattttttgccaccacccccacctgacttttttgatgctccacctgatttcttaccaccatctcctccaagctttatgagcaatgctgaaaatcctccaccccctccagttactcagttacaaatgtctaatgcaccagctccaccacctcctcctccaccaccagcacctgcagccaatgttccaccattgcctgtgaaaaaacatcctcctaagcctcccaaaagacaaagcattgtgggacctatgccaggaacaaatgcacatggaggggcaggtggtcaaccagattttatgtctgatctgatgaaagcactgcagaagaagagagagcctccaacctagagcttctgaggccatgcacaaaaaaactttagtacccactaaattgtagcatttttgcatttcaagatactagatacaaaccctgatactgatacacactgttaagttgaatatcacaaactagggttgtagctttcctttttgcatcttttctcatttcattgaatttgaagaacttcaattgggactcagtcttctgaaaatggtcatattaaatcaacactatctatagttttactattattattgttgcatgataagattcagaacggaatatttaccatttttgtgtattatatcgtgctgtttgataagtaggtccccactcccacagttagatcattgcctgtaaaaagagaaaccattaaactttatccatgttaaaaaaaaaaaaaaaa

SEQ ID NO: 363 - DNA, 2202 bp, Xenopus laevis
tgtaactttactgttcagggttccggtaacagaatggtggaatccaaaatggcgactgtcaagactgctaaaaagaaagtaaagaggtactatgaagaacaagatgaagatcagactccagtaggcaatgcggatggaacagatacccagacagaatctcttaaaaatgttccacatcttccaacagaacaaaaacaaggtcaaaagagagaaaaaagagatcaaaagaagccgaagagtaaatttatatcaggggctaaagatccctttccaggttcagtttctgtacctcaaaatcatcttttaaagtatgagagagctagaaaatcaaaactgggcaggaaatattccccatatgttcagcaccgcttacagacccaagagaatgacatgcagacagcactggggcaagcagccagacatgatgtacttctgccagaggaggaaggatttctagaaggggatgagggccaggacacatgtactataactcaagaagacattgctgaaatagtggacatcaccagtggatcaaagcatttcaacctgaacctcaatcaatttggcccatacagaattaactacactcgcaatggcagaaaccttctgctggcggggcagcgtggtcatgttgcatccctggaatggcaatcaaagaagctcgcctgtgagatgaatgtgatggaaacagttaatgatgtgaagtggttgcacacatataccatgtatgcaatggctcagcggcgttggctttatatttacgactcacagggtgttgagcttcactgcataaaaaagtttaatgatgttttgcgtatggaatttctgccatatcacttcctgctagcaacatgtagttccactggatttctccaatacttagatgtctctgttgggaaagaaataacagctacatgtgttaaatcgggaagactaaatgtaatgtgccagaatcctagcaatgcaattatacacctgggacatcacaatgggacagtgtctctctggagtccatccatgaaagagccacttgtgaaaatgctgtgccaccgtggggcagtgagagccctgagtgttgataaaacaggaatgtacatggcctcttctggtctggacaggaagctgaccatttttgacctccgtacttaccgtccactcacttcctgtattctcccacttggtgcaggatccctgtgtcatagccagaaggggctgttagcagcaggaacaggagacattgtgcaggtttataaggacacgcacctcactcctcctcgctccccctatatgtgtctacaagttaaagcccctattcatggccttcagttctgcccctttgaagatgttttgggtattgggcatggaggaggctttacaagtatgattgtaccaggtgccggagaagcaaattttgatgctatggagtgcaatccttatgagaccaaaaagcagagacaagaatgggaagtcaaagctctgctggagaagatccaaccagaactcatcactttggatccaactcagctgggagaggttgatgctatcaccatggaacagaagcacaaagagaaagtggagagactgggatttgaccctcatgaaaaaaccccctttgtcccccgccacaagttaaagggtcggagttcttcagggaatttgctcaaacgcaaaaagaaggtggcacatgaagaacaaagggaacatgttcggaaaagtatggaagttagagaaaaacagaaaaaagagaagatcagtgaagggataataccccgagctgaaaagtcagccttagacagattcaaaaagtgaacagcagtacagaggacttggcaaacacttttcacgagcagcactgcaagaattccatctttaccaaccaatattactttttttgtgctcatggcatttgtattttcttactagtgttgccacctggtccatattttaccagcttggacggcaaaaaagatgcttgatgtcattactaggggaaaaaatataggaagactggtaattttttccagaaaaggtggcaatcctttttcttacccactatacaacactcagtgagtgtcagtttgtcaaatggcaatagttttactgtatggctatggtttatatgtctttcagccctacacacatgtactgtatatatgtttaataagaattaaataacatgtcagtttcaaaaaaaaaaaaaaa

SEQ ID NO: 364 - DNA, 4507 bp, Xenopus laevis
ggccttatccgacatggctacccccatgcaccggctgatcgctcgtagacaggctgaagcaaataagcaaaatgttcgttgtcagaagtgcctggtgataggtcactggagctatgaatgtacaggaaagagaaaatatttatatagaccttccagaaccactgaattaaaaaggacattaaaagaaaaagaagcccgtttgttgctgggacaatccagtgccaacagtgttgctgaaacaaagatgaagaagaaaaggtctagaagtgtcacaagctccagtagtgggagcagcagcagcagcagctctgatacagactcttcttcagacagcgaagacacatccagctcctcatcatcttcagaggacagtgacaagagcacctccagctcttcaacttccttgtcctcgcaaagttcatcctcatctgagtgtgactctgatacaagtgccagcaggaccagcacaagcagcagtaccagcagtgaagacgacagtagctcagaggatgagcctttaagaaagaaaagaaaaaaatagaattcaggaaaatacctaaatgatagttttctcatgacatcatgaaaaagctatcgtgaagattcttctgtatttgattatagaaaaccttacattagaaacaatttgctagcatatatgtaatacaattatacttgacaaattcccagctctcagtggcggaactatagagaaagcagaccctgtgggggtcacaggggggcctaggggacagggggcccagactgtggggtctgcctttgctatagccactgaaaatgtgtgtggccacgtacataagtgggtgtgtgggtgggagggctgggttgattgctgtgcatgctgggccactccgaagaatttgttcgcgggtgttccaacactgccagctctctattattgactgttttaaagtggcagatcccagttacttccttttttgaaagaccaaaaatgccatgataactccagggtactcaaacagcacaggagaatttaaagggccactgtaaatcgttgtagctatggaggctgatttaatatgtaaataagctatatgtacaaactgtgaagcaatcaatccatttctgtcattttaaatataaacagggtgcaaactaggaacaaatgtttaatatttttccttcactgggaagtactgactttactcatgaagacaggtgtgagaatatatttttagagggctaaactagagtgagcgagagaaatatttctaacaataatagggtgagcgttggactgttttgttgtccagcttgttatattttgtggagaggaagaagccacagacttgaactgttgaagttaacttgttcttttcgttgtgctgagatattgtaaatagcatttcagtgttctgccaagtgccatgactttaaacacagtcatttgaccacaccctgggtggcagactcttcgtttgaaatttgatacagtcaccttgtgttatgttttgggttactaacaatgtgtgccttttttttatttttttaagtaaaaaaaaaatgcagtctgtaattctgagctttgtgacagtatgattggattcaaaagttataacagcaagaagctgcatttttaaaacatatttctagtactgtactaatgtatgttaccgagaaggaaatattttttttcctctaactgctatagaactgcagataccagctgataatgctagaaattatatttcataactgtaatgccagaggttgtatgctttgggtttgttatggattttcaaatgttgcccaaagccacctacaatattaatttcaccttacaaaacattttcaaattactgtatatactcgagtataagccgtcccgagtataagccgaggtacctaattttacctccaaaaaccgggaaagcttattgactcgagtataagcctagggtgagaaatgcagcagcttctggtaagtttcaatcaaaaaattgagggtttctgctcccattggaggtgccggtgtctcgtttttggatgccggcgaccattcttggacgccggcgaatattcttggagactattcttggacgccggcaactattattaggcgccggcgactattattaggcgccggcgactattcttagacgccagcgaccgtttttgcgcttaacccgagtataagccgaggtagagtttttcagcatattttgggggctgaaaaactcagcttatactcgagtatatacggtaattatgacttgtaaattataccacaaataatgccctatctccattgtttaccctctgtaccagttaaaaaagaaacttgttaaaaaatacatagaagcatgacaaaagcctctttcaatacctgtataaaagaaaacgcatacaagttatataatgactggtattacacacccaaaaaaactacacaaatggttccaaacacccaatacatgcccacgaggatgcagggaaatagcagatgaaatgcatatgtggtggacatgtcctatgataaaccaactatggaaagatatctataaatgaaactctagcattggacttatcatctgacccatggttggctcttctattacgcaaaccaaaccagattacaataaatgaacacaagttttacatacaattatgcaattattattatgaaaagatgcctaatagccaaaaaatggaaaggacccccaccaacgatgcaagagattcggaataaagtttggtggacgactgagatggagaaactcattaataaatggtaaaattagtaaatttgaagtagtatggaatatatggttgttcagggaagggatgttacatacattgtaagattatggggcacatttactattggtcgaatatcgagggttaactaaccctcaatattcgactatcgaagttaaatccttcgacttcgaatatcgaagtcaaaggatttaccgcaattcgttagatcggattttaatccatcgatcgaacgatttctcttcgatcagaaaaagctaggaaagcctatggggaccttccccataggctaacattagtgctcggtaggttttatgtggcaaagtaggtggtcaaggtttttttttttaaagagacagtacttcgactatcgaatagtcgaacgatttttttattcgaatcgttcgattcgaagtagccaattcgatggtcgaaatagcataaaaaatactttgaaattcgaagtattttttattctaatccttcactcgagcttgataaatgtgcccccaagtatagaaaaacctcaaccaccgaaaccccccctcttctttctcccccctactcataagttcggtccactggccaagttggagtaaaattaaaaatatacaacgcacaaaaacaaagaatgtataacaaatatgctttattcattgaaatgctatataaatggaaaaaacataactgttaaataatatgtaaaaactctaataaacataaagttaaaaaacaaaaatagaaacttgttaatttccctccctcttatcaattctaaaagcaaggttgccaaccttctaaactattaaatttgatatattacttggtacatcttttgtcagcgtctgaataatgccagtgacaaatgtaaccattgctgtgtaatagactttaagaaaagagctcaaggaatgtgctctctatgagccactcctgaggagtgtatcaactaaacagacttactcagctgcaaaactaaatagaataataaaacaattatttgtggtatactgttttgaacatgctacattttgtaaaggtgaactgcctctaagacacgggcaacccctatgaataaatatgtcttttctttttcatttcgcaaacctctgtaatcttgggaaataagcatgtatttcctgttgtcaaagtgtcagttgtttataattattagctagagttcttttttattgacttgtattgtcatataaaccatcttttatgcacgggcagggcaaagtattggttgcacacaagcttaatactgttacaagctttttaattctctatgtacatttcagatggcttattcatacatatatttgtatacaaatcctattttttttttttaaagcggctacagcaatgtgaataaagtatggaaccattaaataatgaatcacaatggacactttaaccagaaaaccacacttacctctgcattaagccaactttggtcaattgtacaaaaaaatgcgcatgactatcataggagatatttgcgtagtgtgggctcagagtggatctagataattaatggagaggcatactgaaatggtggttggacagcagggtgcaattcttcagctctacatgtatgtgctattttagatggaaaggataactaatgtacttactatagtgagctgtatcaagttatccctaggggtgcgtttaaacattttatctggtgtgtcaaatttgtcttgcaagacaataaaaagtaaagaccaaaaaaaaaaaaaaa

SEQ ID NO: 365 - DNA, 4693 bp, Xenopus laevis
cccgagtgtgacggcggacattcgatgtaaaaaagggaaagaggagcatgaggagctctgcataatgcaagcacactgaatcctctgcagtctgtctgagatactaaacaaaaggattaggggttggtaggacagcctcatcattcttgatttttgtatttcggttcatggaaagtagaatacaccagctgttctaaaacaagatgcacacctctaatgtactatttatttgaccgtagtttctagggtaaaaaccaaggcactttctttaactgtaatatccaaaagacgaaagaacaatttaaaaatgaaccgatatactaccatgaaacagctgggtgatggcacttatggaagtgttattatggggaggagcaatgagtctggagaactggtagctatcaagaggatgaaaaggaaattttattcctgggaagaatgcatgaatcttcgagaagtaaagtctctgaagaaacttaatcatgccaatgtggttaaacttaaagaagttatcagagagaatgaccacctctattttgtatttgagtacatgaaagaaaatctttatcagctgatgaaagatagaaataagttgttacctgagtcagtcatcagaaacataatgtatcaaattttacaaggtctagcttttatccataagcacggttttttccatcgtgatatgaaacctgaaaaccttctttgtatgggcccagaacttataaaaattgcagattttggtttagttagagaactaagatctcagccaccatatactgattatgtatctaccagatggtacagagcccctgaagtattgctcagatcctcttcatacagttctccaatagatttatgggctgttggtagcattatggctgaactgtatactctaagacctctctttccagggacaagtgaggttgatcagatcttcaaaatctgccaagttttaggaaccccaaaaaagaatgactggcctgaagggtatcagcttgcagcgtcaatgaatttccgcttccctcagtgtattcctataaatctgaagacactcatacccaatgctagtgaagatgctttaaatctaatgagggacacaatgcagtgggacccaaaaaagagaccaacagccagtcaggctttaaggcacccatattttcaagttggacaagaattggggcctccaactcagtatgccgagcataaaaagactttgaacaaagcactgcaacctaaagaacctcagccaatgtatgtcacaaaaatgcagtcttcgtcaacatctgaaagatcagaaaaaacatcacctgatacaccacctgcaaccaaccggcctctgcagcagatccaagttccacagagtacaggtgatactcagctgccatccaaaactcagcaagtcactcttccaagcatcagcaaaactatttctccgaagtttgtagccaatggaccccagaccagtgctgtcagcattaaacatggacggcgacgctggggtcagtctgttgttaaggatagctgggatgaaattgatacagattttggaatttcatattcaaagaagccgtcaatggctctagcaaaggaaaacaaacctgaggattcattatttggtttgccagattccatttccatcggtgaggaaaacaaaggttcttcacttgctggcacgaagagaatagacacaagtcaaacaacttcagctaagcagcactatctcaggcaatcccgatatttaccaggcatgaaccccaaaaacgcagggctcatttctgctaataaagatggaaagcatgccacatggaacagtgccctaacaacgaaaccactaggccccattggaggaggcattggttacaatagaactaatggaggcattttaggaggttttgtaggtccttcctacaactcaactgtagcatacatcccttcatttaacaagaaggaagttggatcagcaggacagagactacagttggcacccattggagcagcaacaactgcacccgttatcagtgatgctatgaatggtaaactaaaacttaccaagccaaaatctaccacacaaagaatcttacctgataacactgcagattatgatgcttggaaaccaaaagctgtacgctctcagatgccagctccacctttcaagccagctgctggaaatctatctatattaaaccgccctcaaccactgcagccagtccatggaaggacagattgggcagccaaatatggaggccatcgttaggagctgatggatttttaaattccaagaacttttcccagcatcctgtggctgtttttcattaaaaatgagctttgtgcaaatctaccttttgaaagttactttacggcgtacatgtacagcatacatgccgatatgaaaattaaatctctgctctagaagggagaaataacctgtttaataatagaatgtatttgatttattttttttctgaaatggatagtaaacctatgagcattgcttctaatgcaaaattgaacatacagtgcccccacttattattttcatgtgcacacattattagcctttcttaaatcaaagcagatattagcaatattgcacaatgaaagtgaaatggttggcaagcttattgtttacagagaaaatttaagtttaccttaggcagagcaaacactatggcagcttgcatatatatgtatgtatatgcatagaaagtatgttctgtacacacagactattagctgcatacagtcaatttaatgaaaaatgagggccaaaacatccctaaaactggttgtaactagatgatgtacaccttacctacattacatcacaatattgatacataatcaagggtgggtagcatctattgatgccatgcagtggatctatgtatataaatattcatatgataatctgtcaatccttgagtggttgctgtgtgcaagtccctttatacgagattggtctaatcagggtaagcagccatcattttctactatatttacattttatgcttaatattatttttagagttaaactactatatactatgctgggtttaatatttgtttgaccagtgatcagatgaccctgtgtatgcaaccaatttcagtgtatgttttccactcgtccaatggaatagttgccagataatgaatctgttcaatttgacctactacttgtgaattaacttagctgcttatagggcagtgtggatgtggctatgtaggccaccattatacttacagaatagtgagaaattcactggatcctagcaggctattctcatggagtcaaaaacagttgcaagcaggtttttttaaacagtcatgtaatggaagagaagttttattgagtcccacataaaaactgcattaaatgtaacatactgctcattattctcataccgatggggtgttatagctctgcgctaccactaaactcaaacacctgaaaataacttaagtcagcttcacaaagcaggctgatcaattcaaatgaattggaatcatgtaaaaaataaataaataaatctttgataaatgtgccattcccgtcaataaacttttcttgctatttggcaaaattatcatcagtcaagaaatgttgaaaactatacgattcaacctgctgagaatccatcagggaattttttttttttaatctgcccctaggtatttgaaataaaataacttaaaatagcattgcagtgggatatacagtaagtacttgtaatacatgcatctttatgttgtactcaggtatttgggacaaaagttaatctagtgggcagatatgttattttaaaatgcttactgtgaaatggtagtagcataatacttgatgtgtcaacagggtagttctaaggcagtcactatgggcaagctttccattaaggagccccctattatttattaactgtactaccttgcacatttccctaaagtatgtcatggctattaatacccatttcagtattgaatccctaattatagatacatgctgtgaaattgttttactccacaattactcctttttgaacttgttatgccacataatgccaatagataacagggtttatataaaagatgtgcggaaaaaaatcacctaacatttgcaaactgccactctgccagaacactggaagatgatggcatttttggcaggcctcgtgcttgatctttgcagagctagaaattgtaaaaatcgacagttctggcccaatggtactcagcttcatctatattttacaatccctggcgtttaatgagttaagcatcaagtcctcacattgcttttagcatttctagcaaagtgatatagatatatagatatatattaaaatccctattattacttgtctctaatataatgctataatgaacaaatttctgcactttatgaagtagacatataacaaactgatccatgtttactgtagaaaaatcaatatttatttacaccaatgcattgaacagtgtggactacttaaataatatcatgctgtgaaaggggcatatagggcctagtttaatcacaggttaaaggagaattcggccctttgggaaaaaaacccgtgctccccaccccatggagaccccccctccctcctccccccagcctaactgccccagggggtgccccatatttaaaaaaaaaaaaaaaaaaaaaaaaaaaaaaaaaaaaaaaaaaaaaaaa

SEQ ID NO: 366 - DNA, 512 bp, Xenopus laevis
ggggagacacagactcagccccaggcaggacacaagaaccagaaccagtcaagatggtggccccctctgagctagaacattccatggagaaaatgctgttgactttccacaagtttgcaggagagaagaactacatgaaccgggacgacctgcagaagcttctggacagcgagttctcagagttcctgaagaaccaaaatgacccactggccgtggacaaaatcatgaaggatctggacgactgccgcgatgggcgagtgtctttccacagcttcttctctctcatagccggcctcctctgcgcctgcgacgattattacgtcaaacacatgaaagtctgaaaacgcggagaagaaccaacgtcttgatgacgaaaaactcgccaaaacaccgccacgtggcagccaatagcttatttcctctgcagccactcccactgtcacgtgaccaaatcccaaataaaccccaatcttgtttttttgaaaaaaaaaaaaaaaaaaaaaaaaaaaaaa

SEQ ID NO: 367 - DNA, 1219 bp, Xenopus laevis
ggggggctgcttggactgtgtcattctgtaaaaagggttctaacttgctggagaaaaatggcaactttcaatgaaaaaaagacttgcagccaacgcatggaaaactttggacgctttgtgtggaatccagatacttcagagtttatgggaagaacatttgccaagtgggtgtacatcagtctatactatgccgcattctatgttattatgattggaatctttgcactatctatatattccctgatgaatactatgagcccgtatgttccagattatcaggatcaactgaaatcgccaggtgtgtcaatgagaccagatccgtatggcgatgaagttattgaactcttttacaacatggctgacaactcaacatacctcccacttgtaaccagcctgtgtgactttctctcggtgtacaacaaatcagttcaagaaaagatgaacgcaaactgctcagacagtacaagaatctcatgtgcccataaaaaggagaatacaaagtcctgccagtttaccacagatatgctgggaaattgctcttgggaacatgatcacacatttggctataaatctggaacaccatgtctttttataaagatgaacagaataataaattttgttccaggcaacaagaccgttccacgtgtgaactgttcagctgagagtggagatcttggagatgtacagtattatccaggcaatgacacttttgggacaattggttttcaattcttcccatactgtggaaagaaaatgcagccaaattacaccaatcctttggtagcggtgaaattacttaatccaccagtgaacaaagaactgagtgtagtctgtaaagtttctggacatggcatcacttcagacaacccacatgatccctatgaaggaaaagtatcgttcaaacttaagatagaaaataaacctgattcatctagtgcacattaagccattgtaagaaccagggattcatcttattctacaataaaacaagcagtgcttctgtccttctaacccgaagaaaacaatggaaccatgttttctcatcatttaccatgttaacagtctcagaaagggagcaaccaatatatgtatttttcacttgcaagcactgatatattatgatgttgacataggagtgtcagatctcaattacaaataaaggtaatgtcataataaaatatataaatataaaaaaaaaaaaaaaaaaaaaaaaaaaaaa

SEQ ID NO: 368 - DNA, 654 bp, Xenopus laevis
acgcgtcttgcgttgtgtttggattgacctgggacggacgccgtaaaaaaggaggcgtagaacggaaatagagaggcgggaggttaaaaaagcgcatcgcacgagatacagagtgagagtttagcgattatatctggcctgtgtccgtagtcaaaggaaactaggatgagcctgcgcaaacaaacaccaagtgacttcttaaagcagattatcggaagaccagtggtggtaaagctcaactctggagttgattatcgaggtgttctggcatgcttagatggctacatgaatattgctttggaacaaactgaagaatatgtgaatggacagctgaagaacaaatatggggatgcatttatccgaggaaataatgttttgtatataagcactcagaagaggaggatgtgacctgttctgctttcatttctttttattttttaattttatgttctttgcacgaagagcccagcattttggacttcaaaagatcattcatttctgttttgagactcaagtgaaaacggcatcactacatacattttgagaattgaaaatacttttataaagttattttggtttacaatgatctgtactgatgtaaaataaacagtcatgaaatcagtttggttttgaccataaaaaaaaaaaaaaaaa

SEQ ID NO: 369 - DNA, 727 bp, Xenopus laevis
gggggagtgcgcggtaccggcaggacagctgagcacaaacagaaggacaacttcttccggattattctacggcaacgcgcggacctccggaacatggctggtggaaaggctgggaaagacagtggaaaagctaaggccaaggcagtatctcgctcccaaagggcaggactgcagttccctgtgggccgtattcacagacacttgaagacccgtaccacaagccacggaagagtcggtgctactgcagctgtttacagtgctgccatcctggaatatcttactgctgaggtgctggagttggcaggaaatgcctccaaggatctgaaagtgaaacgtatcactcctcggcacttgcagctagccattcgtggggatgaggagcttgattctcttatcaaagccaccattgctggaggaggtgtcattcctcatatccacaagtctctgattggaaagaaggggcagcagaaaaccgcataaggaacctgtgccctgcttcccactaatattgtactgtaacagaagaaaaaaaaaatttgggatatgtggaatttgttttgtttattttcatttaaagtttcttttttaaagaaatagtttaatggaagagaataggtgccacagtgtagactaagaaaacctttgtatgttgtttaggttaagtttcacagataaagaaagttccttacgtgaaaagaaaaaaaaaaaaaaaaaaaaaaaaaaaaaa

SEQ ID NO: 370 - DNA, 555 bp, Xenopus laevis
gggagaggtcttcgacagaaactaagctgaagatggcggcgtccaaggtgaaacaggacttgccaccttctggaggctatggtcctgtggattacaagaggaatttaccccgccgtggactgagcggatactccatgttcgctgtgggtgttggagtcatgctttttggatactggagcatttttcgctggaacagagaaaggagacgattacagattgaagatctagaggcacgtgttgcccttttgccccttttccaagcagagactgacagacgaatattaaggatgatgagacagaatttggaagaggaggccactataatgaaagatgtccctggctggaaagttggggagtctacattccacacagatcgctgggtgactcccacacttaatgagttatacaatcttaagcccaaggaagaacttataaaaaagaagtatggtttccagtggtatgtgtgatgtctacctcttgagcaatactttgtcttgacatcagaataaaatccttccaacacccaaaaaaaaaaaaaaaaaaaaaaaaaaaaaa

SEQ ID NO: 371 - DNA, 2243 bp, Xenopus laevis
gaagcctgaactgactgagcctttgtgcaacaggctgccagcgctttgtatcagcactcactcccccctttcattgacaacttgcaacccgacacacaggactgcggcacaacttcgaatcatcttcccacggtaacgaatcgcagcgagctggaaactttcctgcgactcggactgacttgtgaaaagttgggaggctgaaggactttgctccgcagagagggattggtggttacaacaacatctagggacaaaagtcactgagctgtgcgcaaccctgggcagcctggatctaaagaaaatcgtctctagctgctcgtctagcatgcagaactacaagtatgacaaagccatgggccccgacagcaggaacgggggcaccgcagcactaaacaacaacaatggcaccagcaactgcaggaaagtcctgctcatattcctggatgtcttctgtctcgtagtggctgggctacctttcctgataattgaaactagcactatccaaccataccatcgagggttttactgtggtgatgaaagtatcaagtatcctgccaattcaggagaaaccattagtgatgctgtgctctctgctgttggcatttttattgccatccttgctataatagtgggagaattcttccgaatccactacttaaaagaaagacctcgctccttcatccagaatccttatgtggctgccctgtacaagcaagtcggatgctttgcctttggctgttctgttagtcagtccttcacggacattgccaaagtggctattgggcggttgcgcccacatttcctgaatgtctgtgatccagacttcagtacaatcaactgcagcttgggttacattgaaaattatgtatgcagagggcctccaaacaaagtcatggaagccagaaaatcatttttctccggccatgcttcattttctatgtacaccatgctgtacttggtgttctatctacaatcacggtttacttggaaaggagctcgtctgttgcgccccctcctgcagttcaccctgctcatgatggcattctacacaggactgtcccgcgtttctgaccacaagcatcacccctctgatgtgctagcaggttttgtgcaaggagccctggttgcttactgcatagtgttttatgtatcggatctcttcaaaacaccaaagaagagctgcactcctactacaatcaagaaggaaatcctctcacctgtggatatcattgagagaaatattgtataaaaaccacaacccagttgcaaattgacttctgacagtgaatacaactacctgctgctctcaaatctcatcagacagtagaatgtagggaaagactttttttttacccaaccagaagagcaaaatgcccactatgaggcctttagattgcaactttgcatgagacacgtgatggtcaactaaatctagatgcaaagcaatgggaaacatgggttgcaattcaggatgtgcaattggtttttacatgttcatgttataatgaacagggtttagttcatatgtttatgaacgccacacattttaatgtaaagggagtcatcttggaatcttcatttcttggcttataggaaagctcaaaacaaaccacagcactatatatttagaaaaagtagcactgattaggatcaggatgtcttcctatggagtcgccttatccttcatgtcattgacctttccatgctgattattttgccagtgttatgtaggggtggttggcaatatcagagggttctcgctgtgcattttgtgcaaagaaaataaatatgaaacatctacattttgtaataatctataatgaaagatacagccaagccagatattcccctgaggatgtttaaaatgaacgtctgtcctgtgaattttatttgacactgaacccagcaggaaggaacaagaccttccaaaaggattacgcaacctcgggtttttagagttccttcaaagcaggaataacgataatggtctgtcttgcttgagattttagcactatgaactttggggttgatacccagtgaatattaatacaaaggatttgatatggtctgctggtcagaacatccaaattccaaaatctgttgtagtctgtgcagtctcttctttcaattaagggttctttaaagaagccatagcatttcatgaaataagcatccatttttcataccgttcattttccactcaccaagataccagtttttaattaaataaaaaaaaaaaaaaa

SEQ ID NO: 372 - DNA, 4405 bp, Xenopus laevis
cccacgcgtccgggaggcagcaggaacagtccttcagattttcgaatcttcagagacgggtgggagtgagaccaagtgctggcatggagcggctggagaactgtgctcagatgttccagagaaaatttctcaacgaggccttccgtcggcattgccctgtattgttggcttgtatagcactgggtgggtcactgctgaaggagctgtcgcccctgccggactcttattggaacaacaagaggaatgttctgaatgtgtattttgtcaaattttgctggggttggacattgtggctacttctccctttcatcacactaacgaattataaactgactggaagcataaccaaagttcttcggaggctgagctctctgctggttggcacgttattctggtacctctgcaccaatctgttcctgtacatcgagcacattactggcagttgctacgagtcggaggccctgctggactccatagaacaccaagacagaaaagaatgccggctccatggcggattctggcacggcttcgatatatcaggacactgttttctgctttcctattgcatattgatcattttggaggaaacgtcagttatccgcagcattcagtttgagagacactggcacagaatggccatcaatgcccagttcactgccttaagcattttggtgatcatttgggtgtggatgtttttgtgcacagctgtttattttcacaacatcttccaaaaagttatcggcacagcctttggcatgctggcttggtacataacatacagatggtggtatctgcagccgatatctcctgggttacccccagccagtgccagtcacagtgaaaaggaaccagtctacaaaaactaaccttaagtgcatgtgccacagcctttaaattatttttaatatcagttgtagatatctgccttatttgtagaacaaaagggggaaaagaactatattttccatttgtataaagctttaagaaaaccatgtccttggatgcatgtaactgacattgtgcgttatttaccctgtataggaatgtaaagtaaaggagtaatgtccactcttgatttataggggttattaaccttctatagcagagtttccccatcctgatgttgcagggctactactaccagtattctcaaacatgtaaggatggagtggagtatgctggggtctgtagtccatcaatatgagggatgtaatcactgctaaaagatgtccatacaggggcagtttaaccctttataccaagttggcatcttttatctgccctgccgactaacagccagatatctatagggtaggattgaaaatcccattgggtgtggacctctttggttacggtatattgatacagttctacttgtctggcaacctcaccaagcaaatggattgtaagctgtatgactagctttaaagcaggactattgcacctgtttttgagagcttggggctgcgcatgggtggcaaacattccctttaaaggggttgttcatctttgagttaactgttagtatgatgtagagagtgagagtcggagacaatttgcaattggtttttattttttgtggtttttgacttataagtttttgacttatttggttggtagggtcctaattcccctagcaatcatgcactgatttgaataagagactggaatatgaataggtaaggcctgaatagaaagatgagtataaaaagtagcaataacaataaatttgaagccttacagaacatttgtttttagatagggtcagttaccctatctaaaaaaagagtcagaaaaaataattaaaaaactataaaggccaattgaaaaggtgcttagaattatccattctataacatactgatagttagcttgaaggtgaaccaccccttttaatctttggaaccgtatcatttgaaagctgaaaagagtcagaaaaaaataattaaaaaactataaaggccaattgaaaaggtgcttagaattatccattctataacatactgatagttagcttgaaggtgaaccaccccttttaatctttggaaccgtatcaactcttaaactgcaactcacagcctttggtaagagtaatttattcagctttatttgattggtgttgttcatttcagtggcatgtccaggtaatatctcatttcagtatttccaaggccatgaaatgggggaaaaaaatctatattgacagctctctgggggaatgctttgatttaaagtcattctgacactgccacacatttcatttggcggggtcatgaacctgacccttactctgagactccatgactcgatatctggggtatacgttaatacttcatagcaaaagatcaatagttccacactgcacggaaaataaaggacactattagaactataataaaggacagggaaaggaaactgtttaaaagaatgaagtaaatagatgggatcttttatctaggaacccattatccaagaatgtaatttcccatatagtcaatctaagcaaacaattctcatttttaatcttttccttgtagtaacatgacagtaaattgtacttgatggcagctgatgctccaaattacagaatgactcctcaactggaaatctcctggtttcaagcattctagattgtagatcctatacctgtataccaatgcagatatttcagtgtcacaactgtatacgagtatagtaatatttcatggtcaataggcattgctcacttatgaggatataaataacagcggtgggcagatcacattttcaaacctgacctatcgatcagctttgaaaatgtaatctgccaatgcaccatgtcggccagtgcatgggacatcgcatttccttcacatcctgattaaacaaccataacaatagaaaacagtctatagatttatggcctctcgtacattctccttccagggtgatcagtcacattgtagccgatcagccactttatttccaactggctcacccataaaaccgtgccagcattgatgttactctgtaatgagcacaattctgcaggaaattgtaggtgtgcagtggccctttaagtcactcaggccagagttatgtacaggtatgggacctggggatttctggataagggatatttccataatttagatctacatatcctaagtctactaaaaaatcaattgaacattaattaaacccaatagaatggtttttgcctccaataaagattaattaattaattactaatcaagtaaaagctactgttttattattacagagaaaaaggaaaccatttttaaaaattttaaaaattctattattaaaatggagtccatgggaggtggccttcctgctctaaaatacatgttaataataatttggagctttctggattacggattcccagataagggatcccatgcctgtttcaacatttcactttttcaaaaaatcactgagcagtttatttttctttgtatgaattgttactactactactgctaacgatggttcgggcaggagaacatgaacagctgtttttataaacactaccaataataaaataatagctcttatctgtacagatatcagcacattacactatataaatacatgatgataataatacactacatggggctgccgtgatagcagcatttgcattaacaatctcctgaccccgaatgcatccatggagaagcaagtttgagattgatatctttaattaatgggcacctacgatttttaattattttggattttggtgacctctctcaaccttaacatttatttaattgtatgtgcaaggtgaaaatttttgatggaaattcccgccaggccattgatgcaatcttcttccaacaggttcctattacgatgcaatcctctgctcaggagccaaaagatcctcatatcagcccgatttggtcaaatcgtggaaacattttcaaagctctaatacatgattggttagtgcttactttccatagatgatttattagagataactgtcttttattaaaataaactctgccacaaagcctacatgtacaaacagattgctaaacgggagatagtttagattaacctgctaatttattttaatctacaactcaacatcctatatttgtagtacaacagtggcttaagggacagtagacttgatgtccctgggctgccatattataactgattattttggtgctaccggtacagtgttatcagggtatgtcaccattaggtaatgcattggtttagttgctattcggcaaggttagaattcctcttgatcattagtcatggagacttctgctttatagcatacagatgttcaaatctgttatgttatgcctagattggtttgttaactgatgttttatattctgattatacaagtcataaattcaaaaaaaaaaaaaaa

SEQ ID NO: 373 - DNA, 3540 bp, Xenopus laevis
ctatttcattcactgctgtgaaaaagaaggagggaaagagaaaagggtgctataaaataataatagggtttgaatagagagatacaaggaaaaataaagaaaaacagaagcagaaggcagtaaaacacagagaggaaatactgtgtaggagatttcggattatcgctgtgctttgcatgtgaacacttctgtcagtataatcagatcacccagaagtgtatgaaggataacgaacaatatgtcagggtcttacgatgagactgtttctctggaggatacaacagacagcttctgggaggttggacactataaacgtacagtcaaaagaattgatgatggtcatcgtctatgtaatgatttgatgggctgtctacaagatcgagcaaagatagagaaggcatactcccagcaactgacagactgggccaaacgctggcgtcagcttattgagaaaggtcctcagtatggaactctggaacgagcttggggggcactccttactgaagcagagaaggcgggtgagttgcaccaggaggttagaaaccatttggtatctgaagacatggagaaagttcggaactggcaaaaagaaacttatcacaaacagatgatgggtggtttcaaggagagcagagaagctgaagaggggttccgcaaggcccaaaaaccatgggccaagaagattaaagaggttgaggctgccaagaaaacataccatatggcctgcaaagaggagaagttggcaagtagccgagaggcatctggcaaggctgatgcttctgtcactgcagatcaattgcgcaaactacaagataaagtggaaaaatgcaagcaagatgttcaaaaggcacaggagcgctatgaaaagattttggatgatatacaaaaatccactcctcagtatatggaaagcatggatttagtatttgaacagtgtcaacagatggaggagaagcgattggtattcctcaaggagatccttttagacattaagcatcatcttaaccttgctgagagcagcagctatgctgcagtgtaccaagagctggagcaaacaatccaaagctcagatgttcaggaggaccttcgttggttcagagcatctcatggccctggaatgcatatgaactggccgcaatttgaggaatggaaccctgatgttacgcacacaatcacccgtaaagagaaggcaaaaaagccagaaggtgctgtcctaacaaatgtggcatctacttcagaaaacagttcccaagcaggagatcgaggaagtgtcagtagttatgatcgaaatcaagcttacgctgctgactggtcagatgacgaagggggaaacagcggctcgtatcccactgcagactcaaatggaggggctaacccattcgaagaggaaggaactttgagggtgcgtgttcgagcactttatgactatgatggacaagagcaagatgagctgacctttaaagcaggtgatgaactaataaaactagaggatgaagatgagcagggctggtgcagaggacaactggacagtgggcggcagggtctctatcctgctaattatgtagaacccatataaagcatgctacctggacagaataatcagactacacatcacctctctaaaaaaaaatcctcttttctcatttatgataccaaccataccttgcagcgcaactgcaatagtagtactagtagtgtttagatgggagtgaagcattatccttatatttcctgattgcaaccataatgggtgtttacatcttaacaccattcttattctgtcttgtattttataattatcgtattcttttcatttaatgcattatctttaatgtgaaatgagaaggaaaggttgactcatgaaatactaacaggattcttatcacttatcactatttattctaagcagtattagatttgatactgttgccccatttacactctctgtattacctgtccacctctacaataactctttttatatggtttaatcttattacaaattagattgtttctgagccacattatgtttaccacttatatttatgcacaccaaactgaatcgtataaatctgtaagcagcaatttctggttaaaaaaaaccaaaaatgtggttcttatagttaccatgggtagccccttctaaagtgctgcttgaggctagattttcattttaacaaagtagatacactatacaaccaaatagataacctcatgaaatgttaactggaagctgaaataagttcaaagatatatggcccccttaagtccataaacgcagcagttatcatcaactcgcttgataaaccttgataaaccttaccattttcagatatcagatttgatgagtgatgtgtgcttatgaacttatacttataatacataaaaatacaagaggtcctttgcactcaacccattttcagtatcttaaggacattaaacccatggggttatgtaaaagaaagcactaagtttgcctaggagcattaactattagcaatcaaaaggtagcatttactggtcacctgtttaaaagcaaacatctaattggttgaaatgggtaactgctcctgggcaaatagtgccttttattatatatggggaaaaagtattaaagtacttaaaatttcctcctatttaaaaaaaaaaaacagagattgtttgtacagagactaaagtgcatatttattattctgtgtaaaactaaatttaccgaaaaaatgtgtaaaaacggtgtaaaattaatggcaaatttataaagatatttgtaattttatgccatgccaatgccagatttgatgccattattttacattacattgagtctagtggtagtcactctaagaaaaaaaatgtacgaaatttacctggcgaagcttgatgatgtggtgtatatcctgctatttttttttacatacaatacacaataaaaatatgcccctatgttttacttttaacttgcctgctttcaagattaaaactcctaaatacttgcccttttattggccactactgggatcacatattatctggctactgggatcatcgtcaaatttgggaattttagccttgaaagcaagcaaattgcaggttaaacttattccctgtgaaaaatgcataataaagctgtagaattcataatgaatcagatgaaagtgagtataggactggccagatgactttgacatagttggccagctttattatattgcaatatatgataaatatgacatatatgacaaacaatccctgttgtgtataaaggggtgagggacatttttagtagcttaattcacacaatgggctgagtgcagagcacctcttgtttttgtctatatgaattttgtggtcacagccttattacaccccagcctaatggtttagaattaaggtgtgagcacaacttttccctttttgctatagctaatacgcaggctgtacattttttgtgagtttgcttatctgtgttttttgtattatctatcccattttaaataaaaattataaagctaaaaaaaaaaaaaaaaaaaaaaaaaaaaa

SEQ ID NO: 374 - DNA, 2242 bp, Xenopus laevis
tgtgggtgtaggtcagggtgctggataggagaattagccacaggagcagattgccactgcaggattttctctctttatccatatccctctcacatccgtaatcttctgcacgacaggaaccctaaatttcgacccttcttgcaaatagatgaggtatcatcatgctgaccagcattgcagaacgtatcatgtactgcctcacaggcaaaacccccaactctgtagggccagtagaaacgtcagaaaccagcgatggctatgatttcctggaggtcaagccaggccgggtcttacgagtgcggcatatcttgccttcttgtcctggtgatagagaagaggaagaattatttgaagaaaaaaatgggggtcaaggattggtccattgcaagcgccggatcactgtttatcgtaatgggcagttagtaatagagaatcttggggctactcttcgttcagagatcttgcattgccgcaatggtaatttagagcctgcagggaccctggaggtggagctgtctgatttcactagcacgggcaatgaaggaggaggaaaggagagcgatgttccccctggtaaacgaaggaaacgcaaacccaagaaggtaattatggttgattgccaaagacaggtgaagtgttgcaaaggcacccattctgatgtggtcctgtttttcatccatggagttgggggttcccttgatatttggaaggagcaattagactttttctccaaacttggatacgaagtagtggcaccagatttggtggggcatggggccagcactgctccacagattggagctgcttacaccttttatgcccttgcagaagacatgaggtgcatttttaaacgctatgccaagaaaagaaacatcctggttggacattcttatggagtttccttctgcactttcttggcccatgagtatcctgacttggtgcacaaggtagtcatgataaatggaggaggtcctacagcactggaacccagcctgtgctctattttcaatatgcccacctgtgtactacattgcctgtctccttgcctggcctggagtttcctcaaggctggatttgcaagacaaggtgccaaagagaagcagctcctacgggagggtaatgccttcaatgtgtcatctttcgtacttagagccatgatgagtggacagtattggccggaaggggacgaggtctaccatgcggaacttacagtccctattctattggtgcatggcatgcatgataaatttgttccacttgatgaagaccagaggatggcagagattctcctgatcactttcctgaagataatagaggaaggaagccacatggtaatgctggagtgtcctgaaactgttaacacactcctccatgagttcttcttgtggcaaccagaaactcagaacactacagcagaggatactgggaatgaatgaagagaaggacaatcatagagcggttagaaacagaagagacttttctgcaattgcctcaaacaatggagaaagtccaagtttggtgaagaggcctggtggtctaatttcaatgggcacggttttagaaaagactttggctcccagaggatggcgagaagggagaaaataacctcagaaaaggcagaaattgtatgtatacagctttagaaagaacatttccaccatccttcctgcttacagttgctgagaaacaaatagcaggatgtagagaaaaaaaatgaccaaggtgcattgtaggtaacatcaagctaattggcagaattaggttgtgttacctgatgccacacaatgctgcccaaatcctaaaatcagaggaagagatcgtaaggagtctgagaagtaatgagatcaaaacataaatagaagactgcagttaaatcgcatatttcttgtgctttgaaaaagacagtgttgatcagatctttagaacatgtagcatttacctgttgtaggcagggtacttcaagttaacctctttattgccagagacgtactccaggccgcaaacatgttaatcacccctgaaaaatctgtactcatagcaggcccagtgaatgaataaagaagtaaacgtaaacgttttgagactataaaaaatccaagctaaatgtacagtgtgtggctcacatgtaatatgaatatgccatgtttttatcctcctgttgtaaacactggcaccaccaactacagtattaactctaaataaacataatttattatgaaaaaaaaaaaaaaaaaaaaaaaaa

SEQ ID NO: 375 - DNA, 2319 bp, Xenopus laevis
cggacgcgtgggtggctcttcttctactcatacttctcttcctcggactcctctccctgcaatgggcaaagaagtatttccagggattctctaaccctcatgtacattacccaccttgccctccccccttaccatttcttggcaacctatttcacctggcacacaaagatctgccaattcacttgctgcatctctccaaaaaatatgggcctatctatcgtctaagcttttgggggaaagattttgttgtgttaaatagttccgacctgatccgtgaagctctgcttaagaagtgggcagattttgcaggaagaccccagagttacataggtgatctgatttccctgggtgggaaggatctgtctcttggagactacactccagtgtggaaggtgcagagacgtctgacccacacatccctgcagaactgcatgcgcaatgacctagagaaagtgctcatccgagaagctaggttactgtgccaggattgtctggacctgaatggggaaccagtggatatatctagatcattttctctaagaacctgcaggatcatagcagaactgacatttggcaccacgtatgattttacagaccccgatttccagaagattcacaaatgcattattgatatcattaagttatgggagtcaccaagtgtcactgctctggattttataccatttctgcagaagttcccgaatcaaaccttaaaccttctgctggagactgcaaagcaaagagattcctttataaagagccaagtagaagcccacaaggcacatctcccatccagtaaatataatgaagacattttagatggaatgattcgcttaattcgagaaaaatctggagatgacagcaacggaatgtcagaattttctgaagatcatcttcatatggctgttgttgatctctttataggagggacagaaaccaccgcatccttattaacctggacagtggcctacctcatgcattacccagaagcacaagagagaattcaccaggaaatcacaggagcagtgggtacagagagatacccaacatatacagaccgtaacagaatgccctaccttaatgccactatttctgagatgctcagacttcgacctgtggttcccctagctgtgccacactgtactattaaggatacaagcattgcaggatataccatccctaagggcaccactgtaatcccaaatatttatgctgctcaccttgatgagacaatatgggacaatgctgcacagttctgtccagatcgcttcctctccccatcagaaagctcaaattctgcccgcgctctccttccattcagtgtgggtgcaaggctttgtattggtgagaccttggcacgaatggaggtctttttcttcttgtctcacctcctgagggattatcgcctcctgtccccttcacctaaacttttgcctcaactcagtgggatgtttggaatcaacctcaagtgccacccatttatggtctgtatatcaccccgagaaaacacacccaaaatactggattttaataaggaaacatgacttttatatgaccatatgaattatgtgggtggaagaaaaaagggcagatgaagcacaggtttttgaaaaaacttttaaagaaggcatttaatatttaaagagaatgtaaaatagaaacagtaacccagtttcaactttcctaatcaggtctctaatgtatttcttttgcatcacattcctacttgttcccacttgctggggtgggcccagctgcattgctttgaagtagtattcagactgtcaatttattattatattattaggtttctacctgtggtaaggccaaacatacgtgcctgctacattcatcctggctgccagtctttgcacctgagcaattcagcaggtggctatggggaggccgtgagaggcaaggcaaacagctagcagagcagagaggggacaagtaaaaaaaaaaaaagagataaacctattcccccctaccatctgctaaaagaatccctgcagtgtcatgtatattagtttgagtaaatacagtatatgagaaattgttatagaaattgacacagaaacatgattctgagcatactgtttctgaactctattctttgtatgttcctatgcaatgtttccattaccgtgttttccaccgcagttctgcatattttttctgttcataacaagagctgcagttttgagtcttatatttaacattgtcatctgtgcttttattatcatggaacggttctttctggtgttggaaaagaataaaacgttgcaaaggaaaaaaaaaaaaaaaaaaaaaaaaaaaaaa

SEQ ID NO: 376 - DNA, 2973 bp, Xenopus laevis
actctgtcacattggcactcgctcacattgtagcaaacagcaggcaccaggcaccatgcctgcattacttctcatctacataggactcctttcactcactcttgagcccgaggtgtcaggagcgccggagtcatgcagctcacagtgtggggagagactacaatcctgttcctgtcacacaacatgtgagaacctgggatcctgctgtacagatttccaccagttctgcgtccgcatcagcccccattctggaaccttaatgggaggcaaagatttcaccattctcaatgtgacgtttagccccaactctagtgtgatctgcagatttaacaatgagacaaatacagaaggttacgtaaatgacgcaggcattgctcactgcatttcccctttgctgctggaaacggggcgcatctccttagctgtatcccaggatggaggcaacacttttacaagatcaggaacatggctagcggttcatcacagcaaagcatcagtggctgaaaagagtgtgcaacttgagcccaagaaatggcagtattatggaacgcctggatacaatggaaccctcaccttgatctggaatgctaaaactcttccttctgagaacatcagcatagagatctggggctataatgaaacaggaattccatatagtgacacctggagggctgactggacatatctctacacactgatctccacttaccccaacaatggcagcttcacattcaccccatctcctgccacagcaccatttaaccagtgggacgtggggatgctgaggatcattgcaagtgataaacttcaaggaaagaggaatgtgcatgccatctggagtcctgtacacgccttagcctggcacctagaagagagtttcagaaatgattctgctgcctgggcaaatgacaagtgtataagctggcgagatgctgagatgaatgccctacccaatttcctgaaagaaactccagattgcccctgtactctggatcaggccagagcggatactggcagatatcatacggattatggatgcgacattgaaaaaggcagtgtgtgcacgtatcacccaggggcagtccactgtgtacggagcatccaggcaagccctcagtttgcttcagggcagcagtgctgctatgattctgctggagctcaggtcctcacctttgactctatagggggcagcacacctgatcgtggacatgactggggttccccaccatacagaaaacctcccagagtaccaggtttttctcattggatgtatgatgtgattactttctattactgctgcctgtggtctgacaactgtcaatactacatggatttaagaccgtccagtgactgccgcacatacaaacctccaaaggctgcctctggttttggtgatccccactttgctacatttgatggttccacatacacattcaatggaaaaggagagtacacactggtgtcttcatcccacaagtcattatccattcaggttcggacaaaggcatttacagttactaaatcagctactggtaactttgggcagataagcgtggttattcatgatgacagagcagccagttcagagataaatgtagccagcatttgttcagtggctatgcaagaagataactcagatgttattgaggtgcgtctgaaagatggatccacacatgagctggagactctgttgaatcaagaagtgattggttttgaggagcagagctggatggacctaagaggggtttttgtatactctgctatcaactcaaatgtcactgtaatgttcccctctggagccggagtagaagtgagaaggcgagaaggtttcctgagtgtaaatgttcttcttcctgatgattttattaaccaaacacaaggacttctgggacgaatgaacaatgatccagaagatgatttcactttcaggaatggcacatccttaccacctaatgctacaccagtggagctattccagttgggtgctgactgggcagtaacaaatgagagctcactctttacctatgattcacaggaactgataaataactatgaggtcaagcatgaccatatgttcctgcctacattttcatttgaagaacatcccagtgagcctcttctggaattgtgtggtgatgatgaattctgcaggtttgatggccttgccacaaatgatctcaatgttgcaaatgccacgaaaatatcttctctcagccattcaagtttggtgaagagccttataccagaggtctcatgtggttggctagctcctccagaaaatgggacaaaaattggcaccgcctacctggctgggtctgtcatccagtttaactgtaatgaaggattcatcatgaatggaactaggctgagaacatgtctgcctgatgggacttggtcgggtgatgcagttcagtgtcttgaaggatccaaggaatcttgttcaagtcagtgtggggtgatcctacaggaatgttcatgccatgtgacctgtgagaatcttggaacttgctgtcctgattaccgcaccttctgtgtccgcattgcaccggagtctggcttgctaatgggtggcagagaatttatggttttaaatgttacctttaacagaagttctgatgtacaatgcaggttcagaagtgaaatagtcacagatgggtatgtggatgatgatgggcatgcacactgtatctcaccgctcctgctagagactgggcgtatttcctttgagatgtctgaagatggaggacacagctatccatactctggcacatggctttctgtacaccctggaaaggtgacagagtctgaaaaatgtaccttggtgaatgaaacaaaatggcaatattatggcaccccactgatctccattaacaaataaagttaacatttattaaaaaaaaaaaaaaaaaaaaaaaaaaaaaaaaaaaaaaaaaaaaaaaaaaaaaaaaaaaaaaaaaaaaaaaaaaaaaaaaa

SEQ ID NO: 377 - DNA, 3170 bp, Xenopus laevis
cacacaggcagcggctcctctaggtcacttcccaccgacacagcacgaaaatgatgctgcaacacccaggacaaggctcggctgcagaagtgagtgcgacggccatagtgccctgtctgtccccgacaatgtcgttcagcttcgaggatttcactaacctcaccccactggttaaagaggaactaaggttcgccattcagaataagcgattctccacccgagccccctgctctttagattcggtggtggtgtccgacggccccttagaattgacagtccccaaatccgagtttgccccagaggaagatgatcggaaaaagaggaggagggaaaggaataaagttgctgccgccaagtgtcgaaataaaaagaaggaaaggacagatagtttgcagaaggaatcggagaagttggaatctatcaatgcagatctaaaagcccaaattgaggaattgaagaacgagaagcagcatctgatctacatgctcaacctccaccgacccacgtgcatcgtccgggctcagaacgggaggacccccgaagacgagcgcaacctcttcatccagcagatcaaagatggaaccctgcagagctaagagacttgtgtgatggacctgagcatctcactgtgttattacaagtcacttaaacctccaacggccaatgactgtgtgtcggagagactccttgctccggaattctacccgggaaaaggcctggatggggaaagacgtcttgtcagaagactggattctgacggcctggaagggtatcacgtgactgaatcctaagtatccccctagagggaacagcgttctttggaagatgcagcaaacgtcatggggctttaactagaagccatttactaatcctgttattatttagcagcactatgggatttgtttgttattttcaacacaaaaatgtgcaatttctcttttttttttttttgccagaaccacaataagtagacatttcagtgtttggaatcaatggggtctgagctactgtcaaccacccatgtgttagttaagacttacaaagcattgccttataggggacgtattaaaggagaaggaaagctacagaggcagtttattgccaatagattagccacaatagtgcgagcgattacactatatttattctgctttaccatacctgaataaacagctttagaagctctctctgtttaggatagcagctgccataatagcttggtgtgacatcacttcctgtctgagtctctccctgctcactcatagctctgggctcagattacagtagggagggagagaggagcaaactgagcatgctcaagccctagtcctggaggtttaagctaaaaacaggaagtctgatacagaagtccacgtatacacaatataaggaaagaaatatggtgtttcttttgactcagagcaacattactttgaggctttactggtgtatttatatagacctttctgataaagtttacttaattttaacctttccttctcctttaagcactacgctaatccatataggcttggcaatattacccctgcttttccataaaccataggccactggattgatttggctgtgtaagaattatgagaatgtgctcactaccccttaaagatccctgtgcagaacagtacaattgaaagtagttcaggtgagaggagaagcagctatttagtcagtcatctccacctgttttgttctgtacaccaaccattatcattctagggtggggatataaatatgtgaaaagaacataaaatgccccttacgttctattttttatttatttaccaatcacttccccgggcagtacccattggcatcagtgccaccagtaatgaatagaggaaagagctagtcatttagtcatttataccttctatacagtgtgttgtgtaagacaaaagccaaaacatttccccatattctgcttttttttccccccaagtacaaataatggcatttacttgtttgggatgtgtctaatatttatattctgcaacagaatattaaatgcgtcatgctgggatatattgtaatgtcccctagctccacggttgaatgaagtccaaaaatagtacaatctaaacacagaaattgcccctgacccctagaggggtttgtagttttaaaggcattcaggttagtgatgtgcgggtcgggatttccccaacctgcacccgaccctaacctgccctcccttagcccatgcccacctgcatccgcacttccgggttatttttatagacccgcaccgatccgccccaccgacgatgtcacaaaagtggcggggcaagcaggcacatcgtctataaaagactaaccatttgacggtggcgggcggggagagcaggagaagagctcaacccgcacccgccacctgcaaaaaagcgtgcaaggtcggccataacttgcccgacccgcggtcactaattcaggtagccaccactggcctctagtggctgcagatggaattacatattgtccaattactttccatctacatcctctaggggcagtgtttgttaaatgaatttggtttccaaccaaaatagtattaaaggacccacctgccatatagacaaatggaagaataatagtttatcagtactgcctgatcagtataacttgggggcctgatgttatgtagattgcaagctcactgggcccaatcatattccttaatccttagatgggtgcactgaatatatagacttctgtgtgtagttcatggatgacaaaccacgcatctcgacttcctttgtgtcctacgtttcctactatatatatatatgtgtataaattatacctaaatctatatatccaaatatattacaggtgacgcaggcgtcatgtaattttgtttggctttttgttatatccgtggcttgtatgttaatcctgttagccctctatgtatagatatatatatttttcactaagtctggagcatctgcaggttgaattatggccgcggttctgcgtccgacgcagttcccgatatgtaacggatgtgaggatttgcatgctaagtcagaataaggtactttcaaaccttttgttttctataatgaggtattttgcgttttgatactttttattaaatatattgaaaaagaaaaaaaaaaaaaaaaaaaaaaaaaaaaaaaaaaaaaaaa

SEQ ID NO: 378 - DNA, 2051 bp, Xenopus laevis
gagttgtgtaaccggaggtctttgcaaagtgcctcaatggctacaatgtccgcgttgccgctgcggctgcttctttgtttcgtggtggcgtcattaagcggactcgcacaggatgtgccgccgtacacagaggattgcagaagtggaacctacccaccctcgggccccacgttcaaaggaaatgtatcttggtatactgtaaatctggaccaggcaccacaggaacggtggcaaaagcttataagtgaaaagaaaacagcactaagcattttaatccaggctattaaagatctggcaacatcattcttcccaagtgaaaagataatcaagctggtagatacaaaactgcctctccttattggaacacttccttgtccatttggtgaagagattaaaggaatcgctgatgcctctgggctgccgttaggggaggtgatgctatttaacatattttatgaagtcttcacagtgtgtacttctgttgtggcagaggataaatctggaaagttatatcatgccagaaatctggattttggattatttcttggatgggatgtgaagaacaattcatggatggtcacacagttattaaggccattggttgttaatgtggacttccagagaaatggcaaaacggtttttgtgtccacaagctttgctggatatgttgggatgctaactggaatgaaacctggcatcttttctcttacaatgaatgagcgcttcagtattgatggtggttacattggagtccttgaatggatccttggaaagcgggatggcatgtggatgagctttctcactagaagtgtgctagaaaatgcaacaagttacgaggaagctaaaactcttttatccaaaacaaagttgctggctccagcatatttcatattgggaggcaacaaatccgaagagggttgtgtgatcacacgttccagggcagtctgccttgatatctgggagctggatttaaaaaatggaacatggtacgtcctggaaacaaactatgaccactggaaggcgccactaccaattgataacagaagggacccagcaatgaaatgcatgcgaagaacctcccaacagaacatctcgtttggaaccatctatgatatgctttcaaccaaacctgttctcaacaagctcactacatatacaacactgatgtctgtgtctgataacaaactagaagcatacctgcgcatctgcccagatccctgcatgccgtggtgaggagagagcaacaaactgaaagtggctcaaatctgaccaatggggttgggtgctttgtggcttacacagaacaaaggagagttattggtcagatgttctgggttggacaacctactactactactactactattagacataatctgcagcttgatcttaagagaccaaaagaacaaatcatgccgtactactgaatattgtgatttctactctatttcctaacggatcacattaaaatgcttctgttggttcatatacctgccagcattatccattaataacatatttgttttaatctaacagtcagggatgttaattcttgctgccggccaatcccaggactattagccagtagggttgactcctcattcctttaatattagccacatataaaagcctcatgttccctggcaggttagggtatgtacccacagtttggctttcagttacattggtttagaagtgcctttgagctctgcacataaagactagtaaaatagaaatgtaaatgcacacaggcagtcgtgacaagcataaaatccaatccgtataatctatgcaaacctgggcacctccatgagaaatatgaacaaggtatttcaatataacacattattataagcctattagaatgaaactgtttcctggctggaaggaaagtattggacttttatgatctattttcagggttagatttactataataatataatattgaattctttttaaactaatatttatttctttcaatgcagaaatgatttcatgattgggtggagtttctttaataaatactcttgtctaaaaaaaaaaaaaaa

SEQ ID NO: 379 - DNA, 4815 bp, Xenopus laevis
ctaggaccctgcagtaaacagctgtgcgggagtagacacctttgtgtattgccagagatactgtccatgccacactatagagcgcctgtgcaagaaaagtcattctctgaatgtagcagatggtcttctatttgactatgtgggctgcttgttgtaactggctgtgttttgatacagaaccacaagagatttcacagggtgatcgaacacaagctttttccaattcaaacttcaggactgctcctccagtttcggaaatctcctgcaaagcttgtggtatccgttttgcagcatgtgctagaaagaacccctgcatggattgcaagaattactattgtacggcatgtctaatccaggcaaacaatgggcattccctttgtcaagtatgcagaagcatccgctccacagcctttgatcgagttgagttgatgaaactaagagtaaaagacttgcgggattacttaactttaaaagacatacccatagacctttgccgagaaaaggaagatctcgtacagcttattttgtttcataaacccccagtttttagtgccgatgggaccaatgtgcctacttctacatctgaccaaagcacagcaaatcaaagaacagattctagctacacccccggacaccccccttccaatacttcagcagcaaacagaaatggttcatccaatgcccagggcacagctgaagaacatttggtggattctgactcatcagacccggaggagaatctggcacctggaaggagggcatccctctctgatctcacttgtgttgatgacatcgaagccctttctgtgcgtcagctaaaggagatcttggccagaaattttgttgactataaaggctgctgtgagaagtgggaacttatggaacgtgttacccgcttatacaatgaacaaaagggtcttcagcagaaggccgctgaggctgaagcagaaggcattcctggtacagcaagtgatgagaatatctgcaaggtctgcatggactgccccatcgactgtgttctcctagagtgtggccatatggtgacttgtaccaagtgcgggaagcgcatgagcgaatgccccatctgccgacagtatgtagtgagagcagtgcatgtcttccgctcctgactcccttaactggttactatcctgcttggaactgtaggcctcttcagctgtacatgccttcagccatctggatatggaaaagttcttttgtccttgcaacatgcacaatattaaggtggaatggcatttctacattgcatttagacatctcttgcacttcttctgcagaatgttctttctggattttgatctatgtctgaatgttctgtaaccaggtataccaaacttgcaccaatttcaatatctgatgcaagcagtacagcagtagagctacatgtttgacatccctgaacaaagtgaattcatatccctgacccatacatagacttaagtgtttatcttctgtaagataatggtgtttcagatgggcatgtcaaagtgcaggggaaacaatctgatttgtaaaactgttttaatttgagcttatgttattaaaagaagattaacatcaaaaaatgaaagtgtttggaagtaatacaaatgtgatgcagtgttgccctgcactggtcaaactgctatttgcttcagagatactagttttgttaatatgaataagctgctgtgtaaccatttacaggagaaaagctcaggttacacagcagatagcagaaaagctctgtagaacataatggagttaccagttatccactatttaacctgtgccatatagctttagtttctgccattgctacacagcagcttgtgtatatgaactacagtatagtagtgtttctgaagcaaacacagcagttttaccagtgcaaggcaacattatatgatatttccagtactataaaacacttttcacattttttggtgttaatgttcctttaagacccatgcaaatcatacaaccgttcaggtgacatgacctatatatttttcaaatatactttttaaagtttaattggtgcctttccctgttgccttaacctttgtcattaatgaagagctttagggagaaatcggagaggggaaaaaatttttgtagtttgaaattaatatttagcagtgagatttttttttattttcgtattttgtctttccattttaaaagctagtaaggttaagtgaccacaataagccaatggacaaaggcaatacgcttatactggaaggactggtaattgttcttaaaagattttttttttattttgtatttgcactgcaacgttgttttcttattgtgaaaaacatgtcactggaacaaatgtgtttctaaatttttattaacgcatttaattttcttattttttgttattacagcaccattaagtcagggcataaactatttcaaaatgaccaaagaagggcgtttgttccccttattggaagttaatatatgcctcctagtcaggttgggtttttttttttaattcatcacagactaccgagcaaagtcggaccatggcttttatttttaggatagccgctcatatctactcataaggtttgattttagcatacacaattgttggtgccttttttatggcttcccagtgtagtctgagacatgttgacttagtgtgagtttttcgttcatatttttgactttgaagctagggctttttttaaataaagtaccccctcttgtagattatgaggatattgtaggttaccgaggagtttcatgaccatataaaaacacaaggccgagtgtttttatacaagtcatggaactccaaggtagcttctggtatcctcgtgttttgcaactgagggtactttatttattataatacacaaatatatatataatctatccatgatggttccccttcttttttttttttttaaagcatattggcattggataggcaccccaatattcacaaagctttgttgacattgccttgctttactgaattactcccatagtctcaggcacttttggagcaagtacaagttctaggaagcacttttttttttttaaaaaaaaaaaagtttttataggagaaaattgggtcctttaaaacgctgttagaatgtgattaaatttgtaacgttttcaagtttgcacagtataagaacccgtttactagactatggtactttggttgcagactgaaaatattagttatagaaacaattcatatctatatctgggattgttgtgtcatgcctggatttacgcataatctaatctttgcatttatttgcactaacaagtgcaaataaatcatatcaaaaattggttcagcctaggcagtcttttaaagggacatatatacttttgcttgatgtggttattgtttttaatttttataaatgtaaatttctgtagtttgtcatggtgggagcatatcagtcatatcaacagacttgaataatttatttttaataacacttttgagtgccaccaaaagaacaatttacgtcaccccataacatggttttgcaacatagcaattgctatactatgagaggttaagcctcactattgtctaataatggactaaaattgactccataatatgacagtatggaagaattttatactaccatttataaatttgagaaatttgtattcttctttacttctagaccaagacagggagtcagcgtaatcttcatagtctttcctttctttcacttatagctaggggccttaaccacaaaatgggctatttcacacatattaaaagaaggctcagtaaggttgtcaaaatgaaatgaaaattatgctttataaccacagtgcccaaaggctgtgcagcatgcttgtagtgcaatgcaattttaacatttctggcatgcacagccttttcgtcaagttactgtgttctctgttccgaatgattctagttggacaactgaaagaagaatagttgaagtgagatgccagctaatgatagttatctgctttccctataaaatgtgagctgagaatcctatgtgcaaaatgtactctgtacacacacatcataaacctgctacaacttttcagtacctttattgcctcaagtctttaaaggtgagaggcttcaacatatgttttacaagaccacgcctttaacgatttggtgtctatatttaattcattcttatactaatgagggctgttcagtactctaccattcctatggctcatgtttaggcaacatgtatacaatggttcttacaatatagaacagtcatggtaccaataatacagagccaacaaatacttttgaagtgcagtatcttcctaggggctcttgcagacgggcgtttttggctgcgctcccctgcgttccggtttcgtgcgttcagtcgcaggggaacgcaggagtagacgcattcaattgttttcggttgggctgtgctcacacagacatatataagcgcagaatgtgggttgggatgcagcatgttgcatttttccttcgttcggcgcttgcgtgcatctgtgtgagtacagccccattgaatatagttcagtttgtctgctcccctgcggctgagcgcgtggggccggaacgcaggggagcgcggctggggacgctcgtctgtaagagtccttaaattgtgttaaagccacattgagataatgctgtgttatcagctgctttcaatagactgtttctgaaaagggctttacctgtaagctggactcatgggtactacatttcctttggccttttctgcctttaattctaaataaagtttggcttgttataaaaaaaaaaaaaaaaaaaaaaaaaaa

SEQ ID NO: 380 - DNA, 1043 bp, Xenopus laevis
ccatgagcagtggtataaggttataattttcttatttcccatgacaaggcgtatgtgccatgatgccatcacgcagcaacgcagcagcgggaataacaaagagcaaagtgaagtactctaagctttctaatacagatgacggatacatcggcattcagtttaagaagagcccttcaaaaatcccttacaaagccatttctctggcaacagtgctgttcttaattggtactatacttattgtgattgggtctctacttttaactggatacatcagcccagggggaaatgagcgagcaatcccagtcctgatcattggcatacttgttttcctgcctgggttttatcatctccgcattgcgtactatgccttccaagggtatcggggttactcctacgatgatattccagattttgatgactgagaagacaacgtacattttgtggattagtacattgcagtgccctggtaggagtagacctactttaggagagaccagttaatgcagaggatacatattgcataggtctaagagtttgtcaactacaacacgaggccctggatttattcgttattaagaatcagaacaaataaacaggttgtggcgtaaatgacacaaatcgatcaactggtaggaggtttcttcctcaaactcaacatagttccgtacgaaaatacttggaaaagtttcagatgtataagggaatatatgtagaaatggttattctcgcatactaattgctgtgtaaatcaattccagttgcagtttttattaccattacattttttttattaccattacattacagacggaaaacaatacagtttatcctttttaatatattttttctgaaatggacggtaaaaggtatgttgtatggacaaggccattccttatttgcatgttaaatcccctttgatttggattattactgtaaaaatgtacagccatgcttatagcatagcactttataaataaacatacagtatatgtaaaaaaaaaaaaaaaaaaaaaaaaaaaaaaaaaaaaaaaaaaaaaaaaaaa

SEQ ID NO: 381 - DNA, 2158 bp, Xenopus laevis
gaggtgcagaagatccggagcggagggggtcggccagcatgttgcactgcgcggggtcccacaaacttgtgaaacaggtgagcgcctgctgtctgctcctgccccgcttcctactcacggcgctaatgctgcggctgctggacttcccgtgtatcaggaggagggtcctggcgtccgctagggaggagagcagccccgagcccgaagaccccccgctgtgcgtgtccgactctaatcgcatgtgcaccaaggagtcgctgcgagccgtctggcacggacacaaactggacttgttcaagtcggcgcatctgggcagctctgcccccaacactcaggtggtgacgctggaagggcagagactttgcaacatcttggatttctcccaggggaaccgaccgctggttgtcaatttcggcagctgcacctgaccccccttcatggctcgtctccaagcctatagtcgcctggtcgcccagcacgtcgccatcgcagatttccttctggtctacatagaagaagcgcatccgactgacggctggatcagcaccgacgcctcctaccaaatcccccagcaccgctgtctccaggagcgtctggccgcggctcaactcatgctccagggggcgccgggctgccgggtggtcgccgacactatggacaactcctccaacgccgcctatggagcctactttgagagactttacatcatcctggagggcaaggtggtttatcaggggggtcggggacccgagggctacaagatctctgaactgaggctttggctggagcggtaccagcagcgaatcattaaccccgagagtcacgtgctcatccaaatctaaacagaggcaccaatgggagagcagtaaccctgcagcagtattattattagtattattattagtattattaaaggcaggtgctggaaactgtattaaatgaagtgactgatctctacagactgcagtgagtgcgactaaaagactcatttctaaaatgcgacaaatgttgctgtgtagttgcaattgagtagctgcggcttagggtaagggcacatgctaactgccttctgcctgctgaaatggaaaatcgcctgcggcagtgcactcgcggtgcttcgatttccgaaggcgcccaaagttgcctcatgatgaaacttcgggtgactttggagatcgaatcgcctgcgcgtgcgttgtcactcacgggcgatttttcattttagcaggcggaaggcaggggagattgtccccccccagggagggggcgattggtcgccggtcgagtagatctccccgagtctgcccgtgtgctaaagctaaagagcacgcgctaagattcggggggatttggtcgcccggcgacaagttgcctcttctttgggaaactaatctccccgaaaagcctttctgcaaactagaatgtaaatcgacgtcaggatggcgctcccaaagttgcctcaccaggaaatttagattctagccggtgccatgagggagattgtcgcctggcgactaatcgcctcttcggcgcaataatctgcacaaactgccttccccctgccttccgccggctgaagtgaggattgcctgtggggaggcacacgcggcacttcgttttccgaaggaaacttcaggcgattacggaggtcgaggcgcggcgtgtgcattaccacgggcggtttttcattttggccggtggaaggcagttcggggagattgtcgccccgaagaaggggcaattggtcgccaggcgactaaatctccccaaatctgctcatgtggccagacccttagagatgtcattgcaaagaataagctataacgtctgtctgtgcatcctccgctgtgtgtgtgcgaccagcgctctgtgaagagggcggggttacaagggcgtgtcactggagccccccacactgactctgcaggtggttgctaatgaagaccgactttgaaatggtctcacggccaaaaactcgcgtccgacgtctccccttccctttctcaaaccacctgcaggctccggtgtcgggctctccagtccagtggatttatttatgtgatttttttttgtaagcagacttttatataaaggatttttttacgattaaaaaaataaaaaaaaaaaaaaaaaaaaaaaaaaaaaaaaaaaaaaaaaa

SEQ ID NO: 382 - DNA, 5488 bp, Xenopus laevis
ctctctaactgatcacaggcacctcacatgccctgaacactgactcttagcctggggctgtaccactctgcaactgacagtatttattctctaacccactcactgcttctttttccttggacactatacatttttcatagtgggactttctgtttggtctggagagagttacgtgcaatagtgagagatgatcccgttccgcgctctgcagtctggcggggctgctcctcgttcctggcttcttctcttggcgctgctgtgtgtatgtatcctgatgagcggggccacaccacatctctcctatcagcgtcccggccagaagggcaagaactggtgcgcctacattgtgaataagaatgtcagctgcacggtcatcgatgggacggagagctttattcagcctcagtacagatgcgcctggaatcagatccactgtcagccaacaatggtatataaagtgagcttccgaccaagatacactacgtcgtataaagttgtcacagagttagagtggaggtgctgccctggctataagggggtggactgcaaagaaggtccttcagaagaagccaagtctgttcctctacagacctctaggcctgcccttggccgcaaagatatcggtgtaaaaccgcaaaagccacaagaggccaaaaaggaattgcaggatctgcagaatttaaatgaagcacaagagaaaaaaattaatttccttgaagatgaaatgcttcgcctaacccagactgtgattgacatgcaaacatctctggcaggtgtaaatgagaacctaaagcttactattcaagaggatgtgagcaagaatctagtttcatggctaagcaacttgccacaaccagaaagtttctctggcggaaaaaccgagactattaagttccaaggattttctggaagtacagaaagagaagatggggtaagagacattatttctgaattaaatggtgtgaaagaagccttacagagtaaaagtcttttgattgatcaactcaatgaaaaattaaatgtatatgaagaacgtttaaggcagttccaggaggcatcacatggacctgcccctacattgcacactggtaatgcaccagagaagtctatagatgataaattagaagcacttagaaatgaaatgctagaaggaatggacatcaaaatggcagatctgaaaaattcctgtgattataaattaactagtgttcagcaacaatgtgaggaccacgagaccagctgtttgggtgtgatagagcttcttagggagaaagagactgaactccgaaaggaaataaatgcagtaaagtcccagggaggcatacaaggaaacggtcagaactgttgcacaaataatggtgatcttgacaataaattaaaacatttagatcaaaaggttgagagaatttctgaagcccacaaggttctcaatagcagaatagacaatgagatacagcatataaacaatctatccccagacagcagttatgaggaaagattgactgaattggattttaaaattaacattacagaaaagaatgctgaggagcattgcttctacattgaggaaactctgagggggctaattatcacaaattctaatgaaatgaaggatcttcttgatacaagactgcagaaaatggaagacattgtatgggacatcacaaatgcatcttctcctgatgttgtgcattctaatactgggtcaacagctcaccatgaaccagaatctgtcagtggacaccttgtaattgaaatgaaggaccttagggatgcagtaaatcaacttgaaggccaaatgtactcaatgttgcactctagtgaagactattcaaacaataatgatggacataaagaaaataattttattcttttaaaatccttgaatgatacaataaatgagaagtttgacctgatccagctgaacaaagtaggtatcgaaacagtgagcagcgacctgcggaaactacagcataaactgatcagtaatgaagaggatttgaatttgttaaaagatggggtgagtgtgtttaacaatcagatactggatataaagtccactgttaaatatactgaaacaggactgcataaaaaagtagaggaagttgaaagactttgcaaagatacctcacactcagcaacaaataatgaatgctgtagtggccttcagagcagatttgaactactgagcagtgaaatgactgctgacaaaggaaaatgtactgaacatactcagggaattcaaaaggagatgtctaacgtggacactagactcgcaaagttggagaatgtttgtgggaagcttgacaccatctctgacagtatgcagaggataaaagatggccttaataagcatgttaccagtttgtggaactgtatacataccatcaatggaacagtaaagtcacattccaatgacatttatggcctaaagaattcagtccaggtgtttcacagccaggtctccaaaatcacttctgatcttgacaatcttatcaagagccaacctgcagtaggagaagaaccagagcagacactgcaaactagaattatacctccgctgccaccaagagaacctcaaaagccattctttccccaagttccacaacaaccaattatcccacaacaacctgtgataccacaaatacctcaatacccaacacagcctaaagtaacagaacatgcagcacaaccaaagctacctcaggacccaagtgtctcaaaaccacagcagcaaccatcacaaccaaggcaaccttccttgccagactctgttttcaccatccctgtacgtcccggaaccaatgggatcattgttgaaactggtgaggctggccccccaggaagaatgatcaaaactgagtcaagacggcctcaaggtgcaaatgggcaggaaacaatcttattggcaacagactcagcagcaaaaatactcaagtctggatctgaacggcctcatggtgcagatggacaacaggcaatgccagtttcaaaaggatttgcaggagcaccaggatatccacaaaaaaatgtaaatgcaagagatgtttttaacataccaacattttcagatgcacaagagaatctgagagtatccttttcggaatcacagggagccactacaacaacagctttgatttccttctctgtggggctgaatggaaatggaatggatacttttgatgttggagtcatccattttaacaacattttggtcaatgatggcgaacactataatccagcaacaggtatcttcactgctcctattgagggccgttacatgatcacagcagtcctgactcctgaacaagaacatcacattgaagccattttgtctgtgtccaatgtcagcgtggcacagatggacacgtccggctacaaaaaagaagttctggaatataacaaaccagggagactaatatgtgggggagtaggcactttccatctcatcctgcatctgaaatctggagatgaagtcagcattgtgcagatcggaggcaagatcgccagctccaaaacagatgaaatgtattccacattcagtggggtctttttatacccttattcttcttcttacagataatttcattccacacgaaaccaaagagacatttaggaaagatattcactgtcattcagttgggggtgttagtatattatatttacaaataatttgtgagcagtttatccattctgtgccctgatgcaatttacatcaccatggctataaatgtctgctttgtgctcagtattagcaacagttttctgaacactttgttacaaacacaacatagtgcactgttaattaatgtatttttttattcaattcaagatgtttttatatattctttatttttaattatcctgaacttttttatccaagccccaatataataatttaatatttagtgactgatattgcatctatttcttcccactctgtaactgatctgcccttgtaaccaatactgtttccaggttggcccttgcagagtataaaaggtgtgccttcccatgttgttctatactgctgtagcatatatctctgcagtgccgtatcagccaatcagcagttatctagcagagaaaaaacgataaaggaaaacatctgattggaccctgaagagcactgattggacctggctgtggaatgagtgatctgtgtttggctgggtgaaatgaattgggccagacgttcagacaagggactttatggggtacgtagggtcctaggcatggtgagcattgagagcacacataaggggaggcagaccacactttctaacttgatctggaataaatgtatataatttaggcaaacattttaatttaatccagaacaaggtgcaatggctaacctccagcaaacctaattgttcagatttagaaaggaatcagcatagatgaggcccctagtgcagacatgtcaagccatttccctctctatgaactataatccccagcatcttcagccaagattcaagattttgtatttactgtattgaggcatctactgtaactgggagaagtgattgtactgtactcgtgctgtttacttattttcttacaactattcagtgatcacaatggtttatttaaatgcttcctttacttcctgcattacatgggacacaattggaaacgacgctgccctcggtaacctacagacacatttcagaagaaataatcgcgctctattaaccttcacatatttaatactcaaaatttataatagaattttcttcttgctggcactgggtgtaatacaaccaataaatatatgaacggttaccccttcactgcactttataaagaatacatatgtggagagtgagtgagcatttttattccttgtgttaatgaaaaggaagcttcatggctgagatactaatgtacccatagatccaaggaaacctaagaccacagtgtcagacatatacctgcagataaacaatgtataatatgtatcaaggctatttccattctttacattactctatagaaatatgaaacaagaaatgttcttgattatggagtgccggagcctaaacctgctgacaagctctttggcgtgagtagaacagaaaccaatgcagcttcctagtgggtgtaaaatgaaacctctgcaatcacattgtggctttcctgaaaccttctcacttgtctgtgattattaaaaaccaaaatgcactcaagcccttcctaagtgactgaatgtatgttttcaggttgtttttagataatatatgtgtttgtgaaaagatacccaccactgtgatttaaccgcctgctttgcctctttcactctgtatagttctgccttaggtaaccccttttcctgacctctaccaaagcagttacacttctacatgtctatgcatttcctatgggttttttgtttttttactttgatgtcaaattgaaatgattataaactattttaaatattaaagattggactattttacatctcaaaaaaaaaaaaaaa

SEQ ID NO: 383 - DNA, 1134 bp, Xenopus laevis
cccacgcgtccgtaaatcccaggcagttacattttcattctttatgaagtgccttagtattttaaattctgtcttctgatctgcagtacatttcggcactccttgttctattagagaaagatgtcattcgacaatttcacatataaaggagccactttttgtgtctctgtacactccgaggagatactcaagaaagtagaagatgaattccaagtcttggatgatgatattttcaatattacctatcctaaatcaggtacccactggatgtcagagattttgaatctgatcaagcagaatggagatccaacctttgtcaattccataccgatgtggtcaaggtccccatggtatgaaactattgcgggctatgatgaagcagaaaagctcacctctccgcggataatttcatctcatattccctaccacattttttcaaagtcattcttcaagtccaaggctaaggttgtttacacaatgcgcaacccaaaggatgtcatcgtgtccatgttttacttctctaaaatactgaagatctttaaagaaccagaaagttttgaagctcaattagaaaacttttttaaaagcaatggaatgtatggatcatggtttgatcatgtgaaaggctggatgcaaatggcgggcaaggacaactttttctacattacctacgaggagcttcagcaggatctgcggggcagtgtagtgagaatctgcaagttcctgggaaaggagttaaacgatgaagaaatcaactcggttgtaaaatattcttcttttaaagtcatgaaggagaacaagatgtccaacttgactcaaatcccagatgatgttttagataaaagtaaaggcaccttaatgcgaaaaggagtttctggagactggaagaaccatttcactgtagctcagagtgaaaaatttgataaggattatcaagaaaacatgaaagatctgaacattaaatttttttggcaagaaacaaaaaaacaataaactgcccgctcctctttctgctttgctcttagatctgtacatgtcacagccagctattacttcctaccatctttagctaaactattgggatagagcatgtgtccctccccaggttattccgtttataaaaaaaaaaaaaaa

SEQ ID NO: 384 - DNA, 2728 bp, Xenopus laevis
ggacgtttaatcagcgactgcgggttttgttcagtaaatcgggactgtccagcgaaaaacgcactgtttggcgatgtcttttgtggcaatggattcccgttggagatgatgctggctgctgaatatgtgcgtgtgcaaaatgtctccctccagaattcagaatgatgaagccatggaacatacagtattctagatgattgtacttgcatttattgcattttatgcaagcagaaaccttatacaaggtgttctgttacatttggtacaccatagggtgtgtttaaatgaacaattggggaccactaatatggggaacacctgtgtatgccgagaggagagtggtgtggaggacaatatcgattctccaagtcaactgacagagaaccgcatcactcctgcaattgaatctagaaaccgcctaagggatccagtaagacctccacggagagccagagggccacatgaaccacggagaaaaaaagcaaatgtggacagccttgtgctggatactttggctgtgatcagaactcttgtagacaatgaccaggagccaccttattccatgatcaccctgcatgaaatggctgaaacagataatggttggctagatgtggtgcagtctttaattcgagtcattccacttgaagatccattaggtccagctgttattacattacttttggatgagtgccccttaccaacaaaagatgctctccagaagctgaccgaaaagttacatttaagtggggccacagctatccaagattccggtaatcctgctaaacaccgcaatacaactgcagtattaggatgcttggctgagaagttggcaggccctgctagcatatctttacttggacctgggattttggaatatttattagaaagtttgaatgtcaaattccatcccatggtcattctctttgcacttatcgcactggaaaagttttcacaaacaagtgaaaataaaattactgtttccacttcacaaattagtgatcgtctcctcttacttgagacttggacaaataacggagactttttgaagcgacaggttgggttttgtacccagtggagtctagacaacctatttttaaaagatggcagaagactgacctatgagaaagcaaatttgtcttcaattaatgccatgcttaacagcaatgatgtgagcgagtaccttaagatctctccatatggattagaagctagatgtgacgcttcttcctttgagagtgttcgctgcactttctgtgttgactctggtgtatggtactatgaagtgactgttataacctctggagtcatgcagataggctgggccacaaaagacagcaaatttctcaatcatgaaggatatggtattggggatgatgagtattcctgtgcatatgacggctgccggcagctgatctggtacaatgctaaaagtaaacctcaccagcatccttgttggaaagaaggggacacagtgggctttttattagacctacaaaaaaaactcatgattttctctttaaatggttgccaacttcctcctgaaaagcaagttttctcatctgcaacatctggtttctttgctgcagcaagttttatgtcctatcagcaatgtgagtttaattttggagcaaaacccttcaaatatccgcctgcaagtaaatttagcactttcaatgattatgcatttttggcacctgaagaaaaagttatattgcccaggcacaggaggctggcgttgttaaaacaagtgagcattagagaaaactgctgtaccctttgctgtgacgagttagcagacacggaactaagaccatgtggacacagtgatatctgcatggaatgtgccctgcaacttgaaacttgcccattgtgccgccaagagataaaaactcgagtccgacagatttcacatatatcttgacatttgtggaagagagagtattttccctttgaaaaggacaacaaactgataaatgcaaatatctgcaaatcacttttttttctgctttgacaaaatggccatattttatagcagtaatcgaatgtgaatgaacccggtctgtcatcggcatgaagagattgacacggagcagacagagcatttactagatactctggatgatctcatctttttttggcgagggggggttgttttgcactaaatttatgcatcattgttttttcaaaaaaaaaagttgtacaatgttctaaagtgtttatttttgccagacaaaatacagtatttgaccaatttttttttaatttttttttttaattcatgtagccgcctgctggtcagtggttttcattattaaaagtggattatggagttatagtggttagcgagtcaaagtttaggacttaatttattccaaagaatattggttacatcttcagcaaatgatacaggtgtaaacgtccaggtttttgtaatctgtactcaatagtggtttataagatttggaaatcttttacaatatttataagcgacttattccagtttttttttttccaagcctctcttgacattgtgaccaaccatataattatttaatcatgtatttgtactgatgaatgttgttaattgaaagttattcatgctgtaaataggtacatgtaaaaaaaagatttgtgttcacctgcaagtatattttgtctctctacagtcacatttttaaaaaaggtttcaagagcaaaaaaaaaaaaaaaaaaaaaaaaaaaaaaaaaa

SEQ ID NO: 385 - DNA, 1849 bp, Xenopus laevis
gtttgagggcgtaggtgtcagtggactgtcataactgtgttagaacagtgaggcgatagtatttgctgagcggctgtccatgcagaagatgctgtctctgctgtcccgtgtgctgaagggcccagcccagaagcctgtcactggggctgctaacgaggctgttcgtgtaatgatggcgtcccgtaactatgcagattttgcatcagaagctacgtttgacattaagaaatgtgacattcatcgtttggaagaggaacctcccactcaggctgttctaactcgagaagaggggctccagtattacagaactatgcagacaatccgacgcatggagctgaaatcagatcaactgtacaagcaaaagatcatcagaggattctgccacctctatgatgggcaggaggcatgctgtgtgggtctggagtctggtatcaatcccacggatcacttaattactgcctatcgagcacatggctatacctacacacgaggagtgtctgtgaaggaaattttagctgagctgactggaagaagaggtggatgtgccaaaggaaagggaggctccatgcatatgtatgctaagaacttctatggtgggaatggaattgtgggagctcaggttccccttggagcgggtgttgctctggcttgtaagttttttggaaaaaatgagatctgtgtgtccttgtacggtgatggggctgctaaccagggacagatatttgaaacctacaatatggctgccttatggaagctgccctgtatctttatttgtgaaaataacagatacggcatggggacctctgtggagagagcagcagcaagcacagactattacaaacgaggagactacatcccaggtcttcgagttgatggtatggatgttctgtgtgttcgagaagccactaaatttgcagctgatcaccgcagatctggaaagggtccaattttaatggagcttcagacttaccgttatcatggacacagcatgagcgatcctggtgtaagttatcgtaccagagaagaaattcaggaagtaagaagtaaaagtgatccgatcacccttctcaaggacagaatgttaaacaacaacctgtctaatgtggaggaattaaaggaaattgatgtggaagtacggaaagagattgaagaagctgctcagtttgctaccaccgaccctgaacctccactagaagaaattgccaatcacatttatcgcaatgatcccacgtttgatgtcagaggagcaaatctctggatcaaatacaaatccgccagctaaatctcttcagtcctcctctggtcaatgttacctgttactttaagggcattttaatgggtgctgggttatgtttgctcctcactgctgggttgaagacgcactgcaattcttcatgtcccaccagtaacatcatccactttagactttgttttaatacataaggacttggcatgtgtatggataagaagaaaatgccttaatgttttcagaccgaaagcagatctgcatccattttagttcagtgtaatcattagagagaactcgtgcttcaggagacccccttttcttccatggttttccctctgattctggctgggcaaagttctcttataatgtaagttagaagctctgccttcttcagatgaaatgttatatatttataggatcctgaacttaaagtcttgccatttatacatgtgctgaaacatttattattccgtttcattaaaactgaccaacacaatgattgctttgtatttttcttagctcctaataaacgtcatcagcaataaaaaaaaaaaaaaaaaaaaaaaaaaaaaaaaaaaaaaaaaaaaaaaaaaaaaaaaa

SEQ ID NO: 386 - DNA, 2528 bp, Xenopus laevis
cccacgcgtccgaaacgaaagagagagctggagaggtgagtgagggagcgagaggcgtcgcaccttgtcctgggaattccaagcccgtgttcctcccagcgcagcacagtggccatttaatgtcctgaagttttgtggacttgtatgattgacagtgacttggagacaacatggcgagtgggggatacaggtcacacaacccatctacctctaatacaactgatttcttggaggagtggaaagctaaaagagagaagatgagagccaaaatgcttgcaaatgagttagtattagcagccgcagggggaggaggaggaggaggagaatgtggcggcaatgacattgtcaataaagctagcagtgagttgaacaacaatggcaactgcagtgcagcaactaccaacaacccagtatctgcagcagcctcagtctttaaagggccttcaaataagagggcagatgaagacccaatagtctcatctactgtgatgcagcaaaagaaagtgcccagccctgtgctagatggggtatctgctggaaacgtgcaggatgagtccactccaccagtttcacaggaaactcccacaaaggcaaaagaaaagaagaattgcagtggacctagtgccaggaaggggaagggacagattgagaagagaaagctgcgagaaaagagaaggtctacaggagtggttaacatcccctctgttgaaagtcccgatgagtatgaagatgatgaagcaggacaaaaagcaagaaaaggagagaatgtagttaccaagcaaaacactctacaaaatgaatctttttccctggatccaagtgaatctttcttgccgcaggaaactgtgaaaactgcaggatccaaccgatataaaagcaataatgctcctgatgatgacatcttaaatcacttttctcgaaatgatcgaacagcctttaatcatttaaaccgtgagacaagttcctctggaaattctggccaggacagtgccctggaaaggaaaattgaagaacttgaaagagatctagcgcaagagaggcaagaacatttgagattaacaaagataatgcaagacaaagaagaattaattcacaaactgacggaagaaatagacttattgaacagagatttggatgatttagaagatgaaaacaagcaactaaagcaggaaaacaagacactgctaaaagtggttggacaactaacaagatagaagattgattgtagctgtgctgctcactactgatttttaccttttgaaaagaggaagggtggcgtagggcaatttagttaagggattagggaacacttgagcaaaagcaacctcttcagtgaaggggaattccagttctttacaaaggtttcatagaattgcatgttgcaagcttgcatatttattactgtggacttcacctttgagaggaatgatatttgcaccagctatttttaaggtatgcattttttaatccacagaaaaatagtttttgcttttaaggaaaacgatcacaaacacagaccactattgacagccttgtcacttacttgcatctgttcccattgcaaagaaattctcccagtttttcaatatattgacatgcattgcaaaagtgtgctccactcccctgaaatatttcacaggaggaaaaacgagtctttctagatttttacacatcaggcagattaacaaagaagaacagaaggacagccatacaaaattgtcacagcacatgtgaaatcagtgtctagatatctcccccatggacaaagggcaagaaagatttaaactgagtcactggaaaggaatgtgtcttgtctttagaggcatgatctctgcatatttttagaaggataaagaatattttgatattccttcagatccatccaattggcattaacatcatgtttctgttgttttaacccttatttatgctggttttgaaatgtattcacagaaagccattgcacaaagcattgaaggaggtaggcttcacaatgtaacatatttctttagtatatattatattgcagctgtatgctccaccttggtttacggctaaatagatataagccttgtttactgtatatttaaccaaatagtcttgtaaaggcatgttttgctctgcaggtcttactggactaaaacaaagtgcagggatcagaaggtgttactatagggttcattttaaacaacgcaggttctcacctgcagaaattcctttcttaaattctaccggtcatatgctctgattataaggaaacaaattgggtttattatgggtgacaactaagttgaaatggagaggttagaaagcactttgctatgaaaaaaatgtttacaattactgtctgattccatctgattctctaaacatttgtattctagcttaatttgctgtgcacaaatatagcattgcctttacaaacaaaaaaaaaaaaaaaaaaaaaaaaaaaaaaaaaaaaaaaaaaaaaaaaaaaaaaaaaaaaaaaaaaaaaaaaaaaagaaaaaaaaaaaaaaaaaaaaaaaaaa

SEQ ID NO: 387 - DNA, 1369 bp, Xenopus laevis
gtgatgctgttcacttgcttgaggcaatgccgcccgcacagctggttggtttaatgtgacttagacctgaggagacgatctctccctggggcccttgctacactacaaaacatttgtggctggtgattccacaggggagactacaaaaatgaggcgcctgaatcgcaagaagacactgagcctggtgaaggagctggatgctttccccaaggtgcccgagagctacgttgagacctcagcaagcagggggaccgtctcacttatggccttctccatcatgggcatcctcactattatggaattcctggtgtatcgggacacgaggatgaaatacgagtatgaggtggacaaagatttcaccagtaaaatccggctgaacatagacatcacagtagcaatgaagtgtcagtatgttggcgctgatgtgttagatttggctgagacaatggtcacctctgcacaagggttggcctatcagccggtgatatttgacctctccccccagcaaagacaatggcaaaggatgctgcaacaaatccagggccgcctacaggaggagcattctcttcaagatcttttatttaagagcgcaatgaggacttctgtcctgtcactgccccccagggaggattctcctatggaacaacccaatgcttgcaggatccatggacaccttgatatcaataaagtggctggaaacttccacatcactgtgggcaaagctatacctcacccaaggggtcatgcacatctggcagctctggtgagccatgacagttataatttttctcatcgtatcgatcacttttcctttggggaacctctgcctgcaatcatcaaccctttggatggaacggaaaaaatagccgaggacagtaaccagatgtatcagtattttatcaccattgtacctacaaagttaaacacaaacaaagtttactgcgacacccatcagttctccgtgacagagcgggagcgggtgataaatcacgccactggtagtcacggggtgtcgggcattttcatgaagtatgacatcagctccctgatggtgacagtgacggaggatcatatgcctctctggaagtttttggtccgtctctgcggcatcattggagggatattcactacgaccgggatgatccacgggctcgcagagttttttgtagatctcgtttgctgcaggttcaagttgggcatgtacagacctcacgaggcaggccaagtggacagaattcattccaatcactgcacagagacattggcccctgacccgctctgaatgacacatactttttacaaaaataaaccttgtcagtgttttaaaaaaaaaaaaaaaaaaaaaaaaaaaaaaaaaaaaaaaaaaaaa

SEQ ID NO: 388 - DNA, 1247 bp, Xenopus laevis
ctacgagctttcctctactggtgctgcctaactcctcccagtcccagcacaagaatgttacaaattgctccagttcccacctaagttgctcactcagaagctgcgactggaagtctgtgcctgtatctctgcaaaatgcccaactggggaggtggaaacaaatgtggagcgtgtggcagcagtgtgtatcatgcagaggaagtgcagtgtgatgggaggagttaccacaaatgctgtttcctttgcatggtatgccgaaaaaatctggacagtacaactgtagccattcatgatgatgagatttattgtcgatcatgttatgggaaaaagtacggaccgaaaggatatggatatggccaaggagctggcactctgaatatggacagaggggaaaggcttggcataaaaccagaagaaaatctggcatcacagaatactggttcaaatacttctaaatttgctcagaaatttggaggcgctgacaagtgtcctagatgcaatgaatctgtatatgccgcagagaaaataatgggagcaggaaagccttggcataagaactgcttcaggtgtgcaaagtgtgggaagagtttagaatctacaaccctgactgaaaaagaaggagaaatctattgcaaaggttgctatgcaaagaattttggtcccaaaggatttggttatgggcagggagcaggtgctctagtccatgctgagtgaagaagctgcagcttatactggagacaacacaacattccatgaagcctgatatttccaagaaacgaagcagcaatgaattccaacctgtactaatcactgtgacactttccatgtatttgttattagggatgcaccaaatccaggattcggttcgggatttagcctttttcagcaggatacggccgaatccttctgcccggccgaaccaaatcccaattttttgttacaaaagaatgaagtaaatgtttcccctttccacccctaatttgcatatgcaaattggggttcggtattcggccgaatccaaaatagtggattcgggggttcagccaaatccaaaatagtggattcggtgcatccctatttgttatactgatgaactttcatacaagcctgtttattctttctctgtaacactgcgattggtagaaataatctgatgtttcaataaagtatttgtttttttttccaaaaaaaaaaaaaaaaaaaaaaaaaaaaaaaaaaaaaaaaaaaaaaaaaaaaaaaaaaaaaaa

SEQ ID NO: 389 - DNA, 2064 bp, Xenopus laevis
ccccgccaacagcagcaccagcgccgattcccaagccgccatccccgggcttcgcttccaacagcccggccaatctcagtgtcctgtagctggttgctcagctaaagtgaaaacgacaaaagaagttgcttcagatactttttgcacatggctgaaacctcagagatggagaattacacctttccagcgtcatttgcgtggggggcagcaactgccgcttatcaaattgaaggaggatgggatgcagatgggaaaggccccagtgtctgggatacattcacccatcagggaggagatagagttttcaagaaccagactggagatgtagcttgtggcagctatactctgtgggaggaagatttgaaatgcatcaaacagcttggattgactcattaccgcttttccctttcctggtcacgtctgttacctgatgggacgacaggttttatcaaccagaaaggtattgagtattacaacaaggtgattaacagtctccttgaaaataatatcagcccagtggtgacattgtatcattttgatatgcctcaagctgtagaagatcttggtggctggaggtctgaaaaaacagttgatatttttgaaaaatatgcacaattctgttatgaaacatttggagacagagtgaaactttggattaccattaatgaaccctatatcgttgccagatttgcctatgaagaaggcatcttggcaccagccaaaaagcacccaggctatggagcatatgaagctggccacaatatgttaagggcacatgctaaagcatggcataactataacacaaactttaagaaacagcaaaatggagcagtttccattgctctttgttctgactgggccgaaccttttaatccaagctctgccgcagataaagaagcaaccaatcgctatttagcattttaccttgattggtttgcaaagccagtgttcatcgatggtgattatccagtttcaatgaaactgaagatttctgagaatagcaagaaggaaggtttgaagacctcaagacttccggagctaactgaagaagaaaaggccttgatcaaaggcacagctgacttcttctgtttaaattactatacttctagaaaaataaagcattgtacagttgcttcagaagaccctagtttcatttgtgacctttcgctagaagagataaaggatcctgactggccacaatgtgccccagagtggttagctgtagttccatggggacttcgtaaactgctgaaatatattaagaaaaccttcaacaacccagtcatttacataactgaaaatggatttggccagaatgatcctccattactcgaggacacacagagatggaaattctttgaagaaacactcagagaggtttccaaagctatcaacatagatggggtcaacgttcaggggtattttgtctggtccctgatggacaactttgagtggatatatggaaataatgcacgatttgggttgtttcatgtggattttgatcaggctacccttccaaggacaccttacctttcagcgctaaaatacagcaatgttgtgaaaagaaatggattagaaggacaggcagataattatgtcattaaaggaccaataacatcaaataaaaacaagattcctttaaaggggtcacaaacccaaatatagcatgttagtaaatgaaagtaaatatgattccaatatatatatatatatatattcattacaaattttcaattatttcacggtgctttgtaagtataattgctattgaatgcaatatcctttgttattccactctactggaactacatgcaccattaaaacaaaataatttgctgtatgtttcatttttatcttctgatgttaacagttgcttaatgggccgctgttccttatttttttaattatccatatgaattgatataaatagtaaaaaggtatgtagaagggaatgtatgtagtatgatgtcttatggggtgtggccagtgatacaagtctataattcacacttcccatagtaactcacaagtttttctcatagcctttacaaaaaaaaaaaaaaa

SEQ ID NO: 390 - DNA, 2113 bp, Xenopus laevis
cccacgcgtccgggagtattgacctactaacacagatgtgtagagcagcaggctgcagactggagcggggagagactgatattcacacacgtatacacacacataggaggcaccgcttcacactcccaacgttgtgatttttgttttattctctgcttgcctggaaaggagcaagtgaagtccttttacgttaaaaaggagcaaaaacggatgcaagcgctaatgcaggtcaaattattgttcctgagcataaaacggaaatggttacaacctggctgtcatgaggccatgaaggaaatttcgccagcagatggaatttaatctaattacgagcatcaagttgacgtgaaattgctctttttttaggagctgcggaaggtttctaactccacttccttctcatgcagctgagaaaaaatgccaacaattaaaaaagagcaagaatgtgcagattcacgtatggaaaatattcttgttcttagttcaaatataccagacatgtcagaatccatggactccagtaatgatatgttgtacagcgacgggctaccagtaaaaaacaaaagctcctcatgtcggagaaaaagggaattcatcccagatgaaaagaaagatgctatgtattgggaaaaaagacggaaaaacaatgaagctgcaaaaaggtctagagaaaaacggaggttaaatgacatggttttggaaaataaacttattgcactaggagaggagaatgccagtctgaaaacagaactgctgtcattaaaacttaaatttggcttgattagttctacttcctatgcccaagaaatacaaaaggtcacaagctccactgctatgtattatcaggagtacgcatcttccaagtcaaatatgatgtcatataacagtgatcctgaacattctgtaatgaccagcagttgtatttcagttatcaagcactccccacaaagctctttgtctgatgtgtctgaggcatcatcatctgtggaacatgttcagccgagcactatccagagcaactgcagaagcactgatataaagagccaaagaattaaacaggagcaaatggaagcggggaacttttcaagggatgccagagaagaaagtaacacgttccaaggctctatatatgccaattatattggaaacacattttctgggtattcacattctcctccacttctgcacataaacagatcgtcaagtaactctccgagaacatcagaagcagacgaaggtgtggtaggaaagacatctgatgttgaggatgagcagcaggtgcctaaaggtcctattcattccccaattgaacttaaaaatggccacgcaacaatcataaaagttccagaagtgaactcctctgcattacctcacaagctccgtattaaagcaaaggcaatgcagattaaagtagaatcactggaaagcgagcttaatagcactcaaaaactgaccctgccaattgatatgtcctcaaagcagcacttacagctggaaaaacacaacagcgagagcatggtacattcttctttgtcccctttatcagttcaagttactaatattcaggactggccactaaaaccaggtcagtggcatcacagggaacttgaaaaaattccaagtgtttgtaaaacatctgggattgtggctataaaagacaatgtctacaaagcctctgagtcagagagcttatatttaaagcaaggtattgcaactctatctgctgaggttgcatcccttaaaagacttatagtaacccaggaaatatgtgcatcaaattccagttaaaagtactactgatttttcatgaaatgcatattgtaaagattgtagtttgcagtaaattagtatgttttgtataatgctcaattttcactggtattgtgacgtcatttcactgtactgttcaagtaatgatgtctacttaatattgtcctttttgtgcacaactgtgttatgatcactatgccttgtgtacagataggtagccaatgcaaggttgtaaatatctttaaacattatttttgccagtctgttataaattgtgcaagttaccagttaaataaagtattggtgaaaaaaaaaaaaaaaaataaaaaaaaaaaaaaaaaaa

SEQ ID NO: 391 - DNA, 2855 bp, Xenopus laevis
cggacgcgtgggtgagcacgatccgacaggcagctgggtcgctacctgcccgaataccctgtaatacccaggaaattacttgcccaggaagagaagcaagatggctatcaaaggttgcctgagcgttaccaaatatttcctgtttgtcttcaacctgtttttcttcattctgggaggcatgcttctctgctttgggctctggatcctatttgacagaggcagttttgcaactatgataggctcctcggtgcccaccttgaaggtctggtcatatgtcttctctggcgtgggaatcctcaccatgctgctgggtttcctaggctgcctcgggtcactcaaggaaatcaaatgcctgctgggattttattttgcattccttctcctgctgttttctgcacagatcaccattggagtgttggtgtacactcagaggaataatctgagtaccagactgggtaccattgttgaatcagttataaagaactatggcctatatgcaaaccagacagatttggaggaaggctgggactttgctcaagaaaagatgcagtgctgtggctggtatgtaccagaggactggctgaaaaaccataagatgcagaacatatccataaacctgtatccttgttcctgccggaatgtttctgctttccatacaaacagcagtgttaactcatccatggaattcccagaggcaaaggctggattctgcatctctggtgccaaagacaaatggccagtatatcagacaggttgcatgaacactctgcaggcatttctcctaaataacagcatcaccattgtcggcgtgtgtataggtatcgctatgctggagctctttgtcatgacattgtcgatgtgtctgtgtagaaacctggaccaaaactacaacaagctggcacgctactcttaggtgggatgtcttcttctcctgcgcagtttatcgaggacagaagactggacatcactttacagctgagcgcttgcttacggattttctgcttcgtgttcatctcgaacacctcggcaggttctttttagcccagtttgtttaatctgttaaggtttcccaatcggctaacagtcagctttcacctgaacatctcccagggccaaaatcctgagctgcagaccactaggccggagatgtcctgagctaatacagttattcttgaaggacttgatggtcttcttctcatcctcagcaactgcgtcacagacatttcctcagaaagacttgtttttttctaatgtaacaaaaagcgcgggctgatttcacaaagggctgccattttcagtatttcacagcatacagggctgaagtggagtgtaatatatttgtaatgtctttgagcatgtattttgtagtgacaaccaactgccgcacaaaactgatacatggatcagtggtgacacctaagagtcaatatgtttctttatagattttcttttattactagaatttaaggtacaacatttagggctcttacacacgagcgttaattcgtgcgctcccctgctttgcgctttcttctgttcatcgcaggaaaaaacgcccgtgtaagagcccttaaagggctattttttccatgatctgttgatactcttttaaagagatacggaccccagaaaataatcttttttttatatctatcataacattatctttgaatgctatttataattttgccataaatgtatttgcctgatgcttttacattacctttcttattaccctgttcctctaggagaggctgccatatctgtgcagcaggagtccgttagtattagaaactctaactgacaagttgagaatggacagtcaggttgacaaaacattcaggtttaggaacttcaatcaacaattacttacaaaagcagaactatcagcaataaacgatcaacattacatttcatgtagatgaatattttgaaatgaaatttttagtgtcagtatcactttaagcttgtttatcaaaacggccaactctgaacagttggattacttagtataaatgtatttgaagatcatttttttgtaactttaactaagcaatttagttcaaagtaaaatcagttaaatgagtcctggttgttcagaatgacagttgcaatgaattggacattcctgccggtctgctcctggaatttactgggtcccagagtgaaatcctttcaggttctcttcttcctctaaagatctggtttccagtcagggtcagactgggccagcgggacactgggaaaaaaactggcctaaaccctgggcccccagtcagatgctgtttccattcatgtgttcagtattacccattcatgtattgactgaatgggtcctagcctaggggggtttaacatacattttaaaatagaagaaagcaggcagacaggagggtgcagtggtttgcttgtaggaaacatggaggcatttagacctatggtacagtgacggccgaataaatttccacgtttagccgccgtggaataaattcgcaaaactcccgcgaaaatttgtcaatgtcaaaataatttggacacacgtcgaaaaagttgctcatgtcaaaactgtcacacggcaacgctattcggatgcccattgactttattttacacccgcgtcaattttgacgtccacgttaaagtcctactaatcctacatttgccaagtgattttaacaacgaaatgcagtttacaaaatgtacattgtacacaactgtttcacctgtatttcagtattgtcgagtgattgttttgtttgtttttaatttgtatacagttttctatgtttttcatatacagcagaatttgcatggaatttaataaataacttcaaactggaaaaaaaaaaaaaaaa

SEQ ID NO: 392 - DNA, 1633 bp, Xenopus laevis
aggatttctaatatttcaatttatacaacgtcagaatgaagtattttgttcatcttctccttgttgttctactcacaatttatgagcgatgcaatgctcagtcctgtgtggtggattctattccagtaaaagaaaaccttgatttaaaaaggtatgctgggaaatggtatgcaatcggaaaaaaagacccagaaggactgttcctgcaggacaatatttccgctgatcatatagtagaggaagatggtacaatgactgcaagatcgaagggaagagttaaactttttggattctggcttatttgtgcagatatggcagctcagtatacatttccagacccaagcatcccagccaaaatgtacatgacttaccaaggactggcaagctatctatcaagtggaggtgataactactgggtaatcgatacagattatgacaactatgcagttacatatgcctgccgctctcttaaagaagatggaacttgcaatgatggctattctattatattctcccgcaatccacgtggattttcacaggctataatgagaactgttcgccaaaagcaggaagaaatgtgcttgtctgggcaattccagcctgttctacaatcaggagcatgttaaaagaaagaaaacaaggatcttatcttcttgatgaacacagaacaggctttctcatcgttgagctatttggcatttcaaaactattggctctatagtctgttaatgtagaacacaataacttttaaaatacgtttaagtaaaatttctctacccaaatgtaaaaccacactgaataatcaatatctacacaaggaatgatacacccacataatatacccatataaccacaaaactttaatatctggatattttaaattaggggtacactatttcgtataacacaaaagtgaatcacatgacaaagattttagttgatgatgtaactaagctctgcttaattatatagtgaataatgtaccccctattgtaaaatatatggatattatagacaccaagaagttctataaccatatataagcacaagtcctaaagcagaggtgacttctaatatcctcatattttacaagagggagagcataatatattataatacacaagttccaatgagtaatgtgacagaaattacatcaccaaacagtttgtgaatgctgtttttgtatttgccttagacatgactgttttcatatttattactgtattccattaaaatttaataagaaaactgccttggcttttaaaaaacagacaatatattttcatgacattttaggagtcatttattaaaggttgagttgtgttttcccatacaagttttttttacggtgtgttgtgctcgaaaatttaataaattcaaggtaatcaagttccccccccctccagattgcattcaattaagtttttttacattctgattttttcataaacaagcaaacattggagtttattcgaggtaaaaaacttcacaaactcaacctttgataaataaccctcaatgttacttgtgctcaaaatattacacaccaaatgtattattgaataaaacacaacaaatacattattttaaaaaaaaaaaaaaaaaaaaaaaaaaaaaaaaaaaaaaaaaaaaa

SEQ ID NO: 393 - DNA, 2223 bp, Xenopus laevis
agagagcaaagcagtgggaaactctctcgatgtgataatgctttagagagcccctgctgctggtactgcttccggctgcttctcgcgcacttctgtcctgtgatggattagttagcttgcacaaagggggcttctattctccaaacttacgcactgtccacggttgcctgaaaagcacttggcgttcggaataaatgactgatacaaaactgagtcatcgtttcagagaggaattcatctgcatgggaaatgaatgctgcggggaagcagcctccaccccatctagagcgcccggacacccttctcgtaccaacttggcagactaaaactggttttgcccaactgtacaatgaaggttcagaaaatgcttgtgatatacgcctgaaacttactaaggaagcactgactttacaaaagcaagacgttatctgtgtttctgggagtgaccagagtacaaatcgcagaactgttacacttcatagacaccctattggaggactgggtttaagcatcaagggtggagcacagcataaagtacctgttgttatatcaaaaatcttcaaagatcagccagctgacaagactggaatgttattcataggggatgcattaatgcaggttaatggcataaatgttgaaaatgcgtctcatgaagaagtggttcacttattacggaatgctggtgatgaagtcacaattactgttcactatttaaaggacgcaccttcatttcttaagctgccactaggttctccggatcctccgagtgaccatagcagcggggcatcgtctcctctttttgatagcggtttacatttaaatggaaatatttcaaatacggctccttcatctccttcctcgccaacagttaaacaagccaaatatgagaagcgatggatagatgcactttcaatcccactattaatggctcggatatcaagattcagagtttcaacagtaaagttaagacgtaactcatttgaactgctagcacttgatgggatatcttcggggattcttcagtttaatacagcccatgacagtgctgactggttaagagcaatatcaacaaatatcaatgatctgacactacaaaatatgaaaatggtgaacaaatgctattctatgtgtgaccagatcattcacatgggctgggtgagtgaaaaagtacaaggttcggatggatcacacatgtataaattcaagttcctggttttgaagggctcatctttctacatatttaagacacaaccagttagtacactagactgggtgcgagcggaaaagatatataacctctgtgaggttttatttaaagtaagcaaggtttggcccgctgatgaaatctggattgaagaaaatctgtatttaaatcataatcaaactgaagagcttgaagatcaaagaccttactgcttcagcgtgcaagttgggaatggaaaaagtcattattttagtgtagaactcggtagcgatttaacagtttgggagaggtctttccaaaaagcaatctttatggaagttcaacgaactgggtccaaaacatacgtttgcagcagccaaggggaggttgtttgttttactgtggacttcatctcaggattcacctgttttgacagcaagtcaaagaatgtcatctggaggtttaagttctcccaattaaaaggatcatcagatgatggaaaaaccagagtgaagctactttttcagagccctgacaccaaacaaattgaaatgaaggagctagagtttcaagacctgacagcggttctgcattgcatccattcttttattgcagcaaaagttgcatctatggaccccatgttcataaacagccaaagcctcgctagaaaatatatttacaacacgtaaacatcgaagctctatggcaaaacaagaactattttcctacagaatttgtttcatgcacagcgaaattttaaatgacttcaatacaaatgactgaaatgactgaaaagaagactatttttgttatttatcgtgtttcattttgactcaaagcatcatttcaatgtacttcgtggataatatcgaaagcacattttcccaatctcgtataagtggagaggacaatgatgatttagcactttaaaaaactgctccaagattttgaacagaataactacaaatgtacattttctttttcattaaacccattatatagaaatccaaaaaaaaaaaaaaaaaaaaaaaaaaaaaaaa

SEQ ID NO: 394 - DNA, 1889 bp, Xenopus laevis
caaaaccagtggtacctaaataatggcgttggcaaccaatagtccggctgatagtaaaacgcttctggccaaatactacaatttgccacaaccagaagacaaaattcaggttatgtatgtgtggattgacggaacaggggaaaatcttcgctgcaaaacgatgaccgtggaccgagaaccactcagaccagaggattgtcgtttgtggaactttgacgggagcagtaccggacaggctgagggttcaaactccgatgtgtatttgaaaccgcgcgccatttttagcgatccattccgaggcgggaaaaacaaactcgttctgtgcgaaacattcacttacgacatgaaaccacatgccacaaaccaccgtttccagtgcacagaagtaatggaaaaagccaaagaacatgagccgtggtttggaattgagcaagagtacacactattcgacacagatggttatccactccagtggccgaaaaacggttttccagctccacaaggtccatactattgttcagtcggtgctggtaaagctttgggtcgagacgttctggaggcgcattaccgtgcctgtctctatgctggcgtggaaatttgtggtaccaatgccgaggttatgccttcccaatgggaattccaaatcggaccgtgcgaaggtgtgagtgccggtgatcacctatggatggctcgcttcctactgcaccgtgtggctgaggatttcggtgttgtggtcagttttgatccgaagccgatgcctggtgattggaacggttccggggcgcacacgaacttctcgactaaggcgatgcgacgacctgacacggggttgaaagcgattgaagacgcagtggaaaaactatctcgaaaacacgcggagcacattctcgtctatgatccgaaacaaggaatggacaatcgacgtcgactgaccggtttgcatgagactagcagtattcacggcttctcatccggagtggctaatcgtggtagcagtattcgaattccgcgccaggtggccgaggacggatttggctacttggaggatcgcagaccttcggccaactgtgacccatatcaagtgattcgaatgttggttcaaaccacttgtctgtgaatggggatgcactaacgatcgctgttgcgatttgccatgctcgctgccatgttcggacaatgatagatagagaagagagccagagagtcagagagagagccatcacattgagcaagccattgctaacccttcattcactctttcattcattcccgcatcatgtgactgactgactgactgactcagtgagtcaagctgtgctgttactattccagctcacacactaccccccccatcttgcgtttgtcttctttgtcttctttgttttgattatcatctgcctaaatgtgatattctcaggctacttacttacttcatctcttatcgtctcatacggaaacacgtataaacgtaaaaccatgaaagacacccaatttgccagcttgtttgagtctattgtatcagtgtacccatccatctaccatctaccgtcactactattactactaccaccattgttgtgacccttccatcccgacaacatctttctggtcgtcatactcatgatggactactaacactgtgctgtgaccttgaggcaagctatttatctaaagggataatacgttttcatggttggtgaccacgtacatgttctgtccacacccactgacccttccaccgttcaccctccaaaccgatttcttatttgtttgttgtttttctttgtgagtagtgttttttgtcggtgtctttaaaatcagatgtgacgaaaaaatatatatttgattgctcttaaaaaaaaaaaaaaaaaaaaaaaaaaaaaaaaaaa

SEQ ID NO: 395 - DNA, 2178 bp, Xenopus laevis
ggggggtgacaggcgtcccgacagcgccagaaggggcctcgcggccgtttttttaggtgtcttcataaaatgcctgctcgcgagcttttctctttttttccaagatggcgcctccgagcatcgcctctttgctcacggcctccgtcatagacaacgtgagattgtgtttccataacttgtcctccgccgtcaaactgaagctgctgctggggattctgcacctcccgcgccgcacagtggatgagatgaaaggagcactgacggaaatcattcagctcgccactctagactctgacccctggatactgatggtagccgatatcctgaaatccttccctgacacaggatccctgaatcttgatctcgaggaacagaatccaaatgtgcaggacatattgggagagctcagagagaaagtcagtgaatgtgaagcatcggctatgctgccactcgaatgccagtacctcaacaaaaatgccctgactacccttgctggacctctcacgcccccagtgaaacatttccagctaaaacgaaagccaaaaagtgccacactcagagcagagctcttacagaaatcaacagaaactgcacagcagctgaagaaaactgcaggggttccatttcactcaaaaggacgaggtctggtcaaaaaactggacacaacaactcctctcaaaggtataccaaagcaggcaccattcaggagtccaaccacaccaagtgtatttagtccgactgctaacagaacacctatagcgccctccagaacgcccttgcgcaaggagagaggtgtaaagttattagacatatctgagcttgacatggtcggaggtggtcgggaagcgaagaagagaagaaagactgttgaagcagaagttgttgagaaaccaccaaaggaggagactgtattggaaaaccctactccagactatgctgctggcctcgtctctacacagaaactgggtgccttgaacaatgagagtgcacttccatctacaagctatttgccagcaacacccagtgtggtgccatcctcctcctacattccaacgtctgaaggacagcagccaacaccactcttccaacacagtttaaacaaaggacaccgatgtaccacagtaacccaaatgctgccaccactactccttctcctgcagcaacccctacctctccattaactcctgctgcaactccagcagcaaccccagcagcgccggctcctcagctaaccactcaaacgcagcctcaacccaagaagagcctttctctcacgagggaacagatgtacgccgcacaggagatgttcaagacggcaaacaaagtcacaaggccagagaaggctcttattcttggttttatggctggatccagagagaatccttgcccagagcagggcgatatcattcaaatcaaactcagcgaatacacagagcaattgccaaaggctgacggtacgggcagcaccaccatgttagtggatacagtgtttgaaatgaactattctactggccagtggaccaagctcaagaagtacaagccaataaccaacgtctcttaggaattcccacaattctcccatggaccaaaaaaaaaaaagtgactgatgagaataaaacaggtcattattgagcaagtgaaggacatttccgatgccttccaaccctgatggatctctgcgtattccccacaattcatacaggacttcttaacggtgattggccagtttgtttttttttttgtattaaaagaacaatgttttaatgttaagttggatccagatgcgctttaggggggttgttcacctttgagttaacttttagtatgatgtagaacggctaattctaagcaacttttcaatcggtcttcgtttattttaattatttgtctttttttctgagtcttatcaattttcaaatgggggtcactgaccccatctaagaaacaaatgcttagtaaagctacacatttacggttattgctactttttcttgctcatctttctattcaggcctctcctattcatagtgcagtcacttattgaaatcaatggatggttgctaggggaatttggaccctagctaccagactgctgaaattgcaaactggagagctgctgaataaaaagctaaataactcacaaaaaccaaaaaaaaaaaaaaaaaaaaaaaaaaaaaa

SEQ ID NO: 396 - DNA, 2129 bp, Xenopus laevis
ggggaaaacagttggtcacatgcagcagtacaggatacatggattacagctgattcgactacaaaggggtttttgggcttggccatggaaccaatatggttgttactgctgttggctattttcacagtttcagtttctgcacagtttaatggatacaactgtgatgccaatcagcacagcagattccccgcggaaagagacatcaccgtctattgtggagtgcagacaataacaatgaagataaacttttgcacggttctgttttctggatattcagaatcagatctatcactgaatggaaaacatggagatgcacattgcagaggcttcataaacaacaatacatttcctgcagtagttatatttaccatcaaccttagcacattggaatcgtgtgaaaacagcttagtggtatctactgttcctggagtcaacgcatatggaattgcatcaatggtacaaattggcaacatatccggttatatagatacaccagaccctccaacaattataagttatcttcctggacttctgtataaatttagttgcagctatcctctagagtacttagtaaacaacactcagcttgcttcatcttcagctgctatttctgtacgagaaggcaacggtacatttatcagtacactgaatttactcctctacaacgattcaacctacagccagcaactgctaataccaagtgcaggattgccactaaagacaaaaatctacgcagcagtaagagcaaccaaccttgacggacggtggaatgttttaatggactactgttacactactccttctggcaatccaagtgatgatatcagatatgacctcttcctcagctgcgacaaagatccacagacaacaatatttgagaatggcaagagtcagatgggaagattttcctttgaagtgttccgattcgtcaagcacaagaaccagaaaatgtcgacggtgtttttacactgcataacaaaactgtgccgatcagatgactgccattacctaacaccaacatgtcacaacagagatagaagagatgctgtaataagaaccacattaactccttacagtttatctggtaatgctgttgtatctgcaggacctatcattacaagaagtgatgaaacaccggcaaataattcacagcttgctcacccaggaaatcagcagttccagataaactctgtcaccagcgcactcatctcaggagttgtaatcctcggtgcaactagtttatctttcttcataattgccctaactctcctgaacagaaagaagcaaaacagtttggttttgtgtggcattcgcaacccagttttcaattaattggtttgatttgcacttccaccctcccatttttaaaaaaaaagtttttaaaaatgtactaacatggacaattcaatattggactgccatgtctaacaatcaaatttgggttccctgtttttgcatgagcactgaaatattttgatgaccataagtatcttgcaaactgaaatatgaaaataaaatgctacattgaatgtcatgtgttaaatactgtgtctaacaagtatgcatatataaagagcacttttgcattgctataatagttacaattacaatgatttgctctttatataatgtatcaaactgctatagaatgcatatatctgatttgtgtaaaatgatattgatcgataatcccaaatgtttactttctaacctgttcatgcttcaggccctttcattttgataagctaagtaattcctttattttagaaaggcagctgttgtagtattaaatctctcttttaaattgcacctttgagtgtgtaacatttaattaggggagcaggccaaagcaagagtaatagtatattttgcaagtgttgtgtcccttttctagatgtttagtaaaactccctgtttatactagatactgtataaaagcatgttgtgttgtagatgccacagaactatacatcccattattctcagcataaactgtgtcaacaatgtatgctgtggtgcaggttgtcattacatgatttacattatacattcatcatcattggaaagaaagaaaataaaaatataacatttgtattaccaaaaaaaaaaaaaaaaaaaaaaaaaaaaaa

SEQ ID NO: 397 - DNA, 2678 bp, Xenopus laevis
ggggagttgcagtctggccatgggaagaggaaaccaccacactaaccatgtgtcatctgtaacctagtgtctgattcagagcgacaagcagacaatcctgtctatacagtatatctggaacacaaggcacaagctggactgtgacaagcactccccaaacacaccagggaattcttctatgatggattacgtattttcacgcctaaaacaagctggacccaacgcagaagtagcataaggatccattgccggacttcatgaatctagataatggagcagcccattaaagaggttatgggagctccaaaaggttcggaacctatcctgatggagaagacaaataatgactttgtgattacagttccaagggtgaatgaaacccaactgacagcagcaacaggaggagcagagctctcatgttaccgctgcactatcccctttggagtggtcatactaatagcaggagtggtagtcactgccgtggcttacagctttaatactcatggatccattatctctgtattcgggctggtccttctgtcttctggactacttttgttgtgcttaagtgccctgtgctggaaaataaggcagaggaaaaagagaacaaaaaggagagagagccaaacagccttggtggcaaaccaacggagtttagtcacttaagaaacatctacagaaaatgtagaatgatactgcttaaatagcttggatcagcaaaaataagtagtgaagcaatccgcaggtttggaattgtatcacgctggaatgtttagattgaagatgacttgggacatggaaagatatgtgatacaaaccagtcatgtggtgcagcagcctagcatcccttgatcagtcatgagatgaaccagtttagagttccctgtcaaagcaagagtttcttcaatgtctaaagactcaaatacattacattacaagctaaatatgcatcaaacatcataataatctgaatatgcattgaacttacagtatatactgtatatgccacacactaagccattcacatatattgaagtataacaataccatatgaatgattaacgggtcgaatcatatctgaaacaattgctgattatttagattaatcgaatctaaaatgatttagatcagtactatcaacttcaaggccctgtcatttttatgcagtaagggcctagcaataagtagtcagatttttggatttcttcttttcattggattttattcgtttgcatcagtctttatggctgcagtggtcccttctgggtgagtggtcatgaaatagctgaggtgttattattatgtattgctaatgttatatcagcaggtgctcatttccatttatgttatatcagctgatgatgacttccttataaaatgggcctgaaaagattaaacctattaaaatcccagtgcaaacaagtaagtgtgcactcgtatatgtagttatgctatactgctaaaccaggcaacagtaaccatttctaaaaacacatgcttggaaaatgagacattattttaagctgcagttgggggctttgatatatctggtatagaatacataggtacacatgtatcataccatgtaattcaaattcttgttgcatttttcctgccgcctgatgggaaataaatccaaacataggctaatcatatataatcgctacataaaactgtaagatgcagatttattaaggtttgaatggtaaattcgaattttcaaattttttttttttgtcaaaactcaaattttaattcaccaactcgaatttgaatttgaatgtgagatttatcactctcgatttactctcaaactgttctaattcgaatattcctcaaaaaaacgtgttgtacaggtcaatggcagaggtctgacgaaccatttaaatatgttaattgccgtcgtaacattcaagtttttttttttggaggaaaactattcgaattcgagtcaaattttcaggtgatcaaatattagacgttcaagttttttttaattaataaataacctcctattcgagttgtgagtacattcacgtttattacagttaaaaaatttcaaattacttctgtccacatgggtttagtcacagtaggaaaagttcctctgtaaagaaaaaaaaagcatataatcagcactttataactaattacatcataattagtctacacttaagaccaacatatataacaggccatggagtgtttctcaagacaacacaaaagcaagtttctgcttaaaataattctgttctgaattgctgcctatacaatgcaaggttgtttctaagcttaacttagatgatcagtttactcttaagaactattctaggacatgaaacaacaagagcagaactacgtaaagcagttggggtagagctgttaaggagaagcaactgatggtagattgaagtcagaattattattttataattatttttacagttatattgtctatgaccttcatttgaaatagctgattaatagacagacggtttttttttttttgctaaggcacatgactttcatggtacttgtagttatttttttatgattaatattattactgtaataattatggtgtatttaggtcgctatttgtaattctatttgccaacaatgatcgcactatgtggccctttgtatcgaaaaaaaaaaaaaaaaaaaaaaaaaaaaaa

SEQ ID NO: 398 - DNA, 750 bp, Xenopus laevis
cggcttaacaacagggggggaattaaggggagcggagctaaagcggctgcctgttagttccacgccaaagctacggtttcagcatgacacgggcaggtgacttgtgcctgagttctgccggagcgcgggttacactggctaccagcagcgatgacagacacccagcaaacaacataatagacgggaacaccgacacattctggacaactactggaatgtatcctcaagaattcatcatcagtttgaatggcattcagaaaataaacaagataatcctccagagctcattagtacgatctgtaaggattgaatcaagcacatccaaagaacctgtcaactttgagctccgtctagaaagagatcttgaaaatactgaagagcatctacagtttgaggagtttactctcccgggcattcaagttgcacatattcgttttgtgatcttgtctggatttgatcattttgcatctgtgcacagagtttcagcagaaggagataaataaacagaatgcagagatcatatgaaaaatgccagcaacttcattcaccttaataagcgcattattgcagtccggtgttttcatttctcataccagtgacagagaaaatatatgctgtatataaaggctggttataatataaaatactagactggaatagttcccagaacgttttcataaaattttgtaaatattattaaatattttcgtaatttttttccccacaaaaaaaaaaaaaaaaaaaaaaaaa

SEQ ID NO: 399 - DNA, 937 bp, Xenopus laevis
caaggcgctcataaactgaaacataattgatcccagcagtacagtaatcaccgccgtttctactctgatctcggcgcgctgccaagcggctcgacctgatatttcttaacaacgagtatgcgcttaaaagaaggcagaaataaagtatttcccaaatcaaacatggccgtgtaaagcgcaacgtcagggaaacgcaaaggctgatctaaccaatagcaaataagcgagtaatcacttttacctagtgggagctcgtttctattggttgttgtctccaacaccacccatttacttagtctatctgtgacgccttcgattgctttttttttttactgggcaagtcatctaaatgccgtatctgattggatgagagagcgactcggctccgccctgcgggagtgtgtttgtccttgactgtgtgcgtttgagagaagcaggcacaggctcagaagtgttaatatggcgcagccggagattgagggttttactcctagtacgtatgacagtgagggcttcaagagcaaattcataaggaaagtgaaggagaacccgtttgtacctattgggtgtcttgccacagctggagctttaacctatggcctcatatctttcaagcaaggaaaaacccgtcagtctcagcttctgatgcgcacccgtatccttgcccaaggatttacagttgctgctatcatggttggtgtggttatgactgccatgaagcctcgtgacaccctcaagtgagagagaaacagtaccaagcacccactgaagtaacgcaatgtctgacttaaagcttttcttatgcttgcaacatagactgtacagtggttacaagaaatgcagctttggtactggctgcactcttatttaagaagtgtattttatatgttaaataaatctgccatataaaataaaaaaaaaaaaaaaaaaaaaaaaa

SEQ ID NO: 400 - DNA, 4328 bp, Xenopus laevis
attcggtatccggttgctgctgcaaatatttcaacacaacaagaatagatttttgttgtgatcatttaaggagaacgtcgaagacaggtcgtcatctgagagagccgattcaagattcgcggattgataccgcggactacttttagtggaaagcgttccggtattacaacccggcgccatttcataagcaaagactgtcaggccgctgtaggtacagagaaccgacactccaccatcgatatggcggcatccgtaggcaatgtggctgatagcacagaaccaacgaaacgtatgctttccttccaagggttagcagagttggcgcatcgcgaatatcaagctggagacttcgaagcagctgaaagacactgcatgcagctctggagacaggaacctgataatactggcgttctgttgttgctgtcatctatacatttccagtgccgtagactcgacaggtctgcccatttcagcacgttggctattaagcagaaccccctacttgcagaagcatattcgaacttggggaatgtttataaagaacgaggacaacttcaggaagctattgaacattatcgtcatgctctgaggctaaaaccagacttcattgatggatatattaacctggctgcggctttggtagcagctggtgacatggagggcgcagtacaagcttatgtgtctgctcttcagtacaaccctgacttgtactgcgttcgcagtgacctgggtaatcttcttaaagccctaggtcgcttagaagaagcaaaggcttgttacctcaaggcaattgaaacgcaaccaaattttgcagtcgcttggagtaatcttggatgtgtatttaatgctcagggagagatctggcttgcaattcaccactttgaaaaggctgtaactcttgatcccaatttcctggatgcttacattaatttgggaaatgtgctaaaagaggctcgtatatttgacagagcagtagcagcatacttaagagcccttagcttaagtccaaatcatgctgtggtccatggaaatttggcttgtgtgtattatgagcagggccttattgatcttgcaattgacacttaccgtcgggccattgagttgcagccacattttcctgatgcctactgtaatcttgccaacgctctcaaagaaaaaggcagcgtggttgatgcagaagaatgttataatacagctcttcgactctgtcctacgcatgcagattcccttaataacttagcaaatattaagagagaacaaggaaacatagaggaggcagtgcggctttatagaaaagctctggaggtgttccctgaatttgcagctgcacactcaaatctagctagtgtattgcaacaacaaggaaaacttcaagaagctctcatgcattataaggaagctattaggatcagtccaacttttgctgatgcttattccaatatgggcaacactctaaaggagatgcaggatgtccagggtgcattgcagtgttataccagagcaattcaaataaatccagcttttgctgatgctcacagtaacctggcctccattcacaaagattctggaaatataccagaggcaatcgcttcctacaggacagcactgaaactgaagccagattttcctgatgcctactgcaaccttgctcactgtcttcagattgtttgcgactggacagattatgatgaacgtatgaaaaagctggtcagcattgttgcagagcagctagaaaagaacaggcttccttctgtccatccacaccacagcatgctttacccactgtctcatgcctttaggaaagcaatagctgaaagacatggaaacctgtgtttagataagataaatgtccttcacaaaccaccatatgaacaccctaaggatttaaaggccagtgatgggagactacgggtgggatatgtgagctcagattttggaaaccatccaacttctcacctcatgcagtcaattcctggcatgcataatccagataaatttgaggttttttgctatgccctcagcccagatgatggcacaaactttcgtgtaaaagtaatggctgaagcaaaccactttgttgacttgtcccagattccctgtaatggcaaagcagcagatcgtatccaccaggatggaatccacatactggttaatatgaatggctacactaaaggagcacgcaatgaattatttgccctcaaagcagcgccaattcaggcaatgtggttggggtatcctggaacaagcggagcaccattcatggattacataataagtgacaaagaaacatcccctattgatgttgctgaacagtactctgagaaactagcatacatgcccaatacatttttcataggagatcatgccaacatgttccctcacttaaagaaaaaagctgtaatagacttcaaatccaatggccatatttatgacaatagaattgtactcaatggaattgacctgaaagctttcctggaatcattacctgatgtgaaaattgtaaagatgaaaggcccagacagtggagataatgttgacaataattcagcactgagcatgccagtgattcctatgagtagcatagcagaagctgtgattgagatgataaatcggggacaaattcagataacaataaatggattcaacatcagcaatggacttgcaacaacacagataaacaacaaagcggcaactggtgaagaagtgcctcgtactatcattgtcaccacacgctcacaatatggacttcctgaagatgctgttgtgtattgtaattttaaccagctttacaaaattgacccttctaccttacagatgtgggcaaatattttgaagcgtgtcccaaacagtgtcctttggctattaagatttccagcagttggggagccaaatatccagcagtatgcacagaatatgggccttccccaatccaggatcattttctcacctgttgcacctaaggaagaacatgtgcgcagagggcagttagccgatgtttgcttagatacgccactctgcaacgggcacaccaccggcatggatgtgctctgggctggaacgcccatggtcaccatgccaggtaaggagtctgcagaaagtttagggttacacaacaaagattgttttctttcaggcgatacacttgcatcaagagtggctgcttcacagcttacatgtcttggctgccctgagctaattgctaaaagtcggcaagattatgaggatattgctgtgaaactgggaactgatctggaatacctgaaaaagatccgcgctaaagtctggaagcaaaggatatccagcccacttttcaacaccaaacaatacacaatggatctggagagattgtatttagaaatgtgggagcattttgctgcgggaaacaaacgtgatcatctcatcaagcctgtggaaagcaccgaatccgcttaactccctgctggccccgaatatatcggccaaacacattggagagctgcagcgcacactcaagctgacctttaccgtgcgatagaaggaagttatttaaacacctgttgggtctttagacttatagtttgctttaatttttttttattttttttgctgttttgctaattccatcatatcttgcaagttgccatccaaatatgacaccatgggcagttttaattgttcatgtacatttttagccttgtattgccgtatatttggaatttgagcttttaaacttatcaatttgtgtttgtgtctgctagctcagtcgcagcttgaaactcttcactaactgtgcaggttaaatgataaaaaaaaaagaaatcataaagcatcattaatggtgttctagtccttttttataggttttataaaccacttgtagccttttaatgtctggcatctgtttacaagcaaactgtgtgtgtacttttggtatagatgagatgtctttaaccctcccccccgtaaatgtctgctttatttgattttcttaccagcctatacatctcttgaattaatccgtgtgttaatacagtgagctacgagcagctacggaaggtcagcgggtggtatttgtgtttgaagaaatacaaaactttttttttttctgtgtatgtacctttaaatcttgcacgcagcccacttcctgaaatgtctcactcgcggaatgctgggaaactcaagcctattcagttttgctgatctcgtgtggatgtgaaatgcgatgtctgtgtgaaagagacgcatgtgctccaattctttaggaataaaaatgcctctgcacaatgccgatttgatttaataaaataatcagttgatcttgtggaaaaaaagtaaaaaaaaaaaaaaaa

SEQ ID NO: 401 - DNA, 4551 bp, Xenopus laevis
gtattttgcttgttcctggatgacctgcgttccttgttccagtgttcttgttccagtgttcttgttccagtgttcttgtcccagcattccttgccctcctgatttcctgcaccttcaaaattaaaatcgaggccagaaactaaagggaaaaaaagcaggcggatgatggctgagtatttttggaacgagtctaattatacggtgatgagctgaaaataacatgtctgaagtacaaggtaccatagagttttcaatagagctgcataaatttcacaacgtggacttgttccaacgaggatattatcatgtaagagcatctttgaaggcatcatcacggatccctcacaggctcgtggctacacttgtaggtcaaacagatgatcctgggccatacccgccgtgtgtgtatgataatgttgtgtacagccgcatgtttcagatcctgtacagaaatgaagacattgacattaatgatgtgatggcattcaaagtgcacttgctgctcgatggagagagggtagaggatgccctaagtgaagtagacttccagctgaagttagatctccactttactgacagtgagcaacagctgaaagacatgtcggctgtgcccttgatcagcagtcgcactctgggcctatatttccacccgacgagcggtttgcaccaccatgttcccgtcatgtttgattatttccacttgtctgtgatttctgttacagtgcacggctcattgatagccctgcatcagccgctgataagctttgcccgcccggtgaaagcatcatggttggggaaaagtggccaggaactggtcacagacaacaccagcatttcaatggagaacctggtgttcggaagtgcttactgcaagccaccatcatcagagggaagttatgtcccatcagaagactgcatacaacatgcctataaatggcacaaggacctctgccagcttctgctttctgcctacagtgccctgggcttgtgtcatgccaacgtcttaaaagaaattccagacctaccccactctgagatagaggaattaccaactgaaaggactttatctcagctgtgcaaccaactgcagctgctgagtgaccccgaggagataacggaacagataagtaaggacctggcgtggctccgctctcagctgctcataacgtggagccacttcctggaaacggtcacccttcagcctgatgtcacttcctatctgatgcaggaacaccacacgctgagggtgagacgattttcggaagcctttttctatacagagcacgagaaacctgctgttctgacattccaggaaaacctgattcagagccaaagcaacctctcaacagaaatccggaattcggaatatctggctgccctgcctccccttccaatagaatgtttggatattgacggagactggaactctattcctattatctttgaagatcgatatgtggagtgtccaagaaaagattacattacagataatgcacttgcggagccagcaaatgaagacgaatgtgaatttagtgaggaatccccatctgaaaatactcatgttggctccaaaccacattcaattcaatcaacaacagttcatgaaaatgcatcgtttgaaaagccaaatgttggcactaaagctcaggaagattgttctactgagggcccagaacaaggctttgatcataatcaggaagctacaagtgttgaatcagaatttgtagcagattttactccattacctattccaccctctgaaacatctgacagtggagccaaattatccttgtcagctctaaatgaagactgtgatcaagttaccaggtgctaccaggaaccaaaaaggactccaggagttacttatattaaagtaaaacctcaaagccaagatcaatacaaaggagaaacagtgttaattgtcagttcccaatatggtaacagcttgtctctggctaacagtgaagctcctcaatctgaaagtgagacaatgaatagtaacaatggcatgagaacatatgaacatattgctctacatgaaataagtagcacgaaaaatgaactaatttcaacgttgaaaagtcagaagtcccgtcagtgcagtcatatattattaaagagcagcagcactgaattgataaggaactctacagaagataccttgatggtgaaatcgtgcccaagagatatatatgaaaagtcttcattattcgcatcagggtgtatcaagaggtcttcttctgtgatatcagactctggaatagaaagcgaacccagctccgttgcttggtgtgatgtccataacaggagaatggacttaaacagcgataaagatcttctgctgcagctatcaaagcaacactgggcctacggaaactccttggaaggagaccacatggaaagtaacacaagtttgccgagtgggatccaggcctcactagcttccataaattctttgccgttcgaggaggaagacagggaaatggagctttcaaagttaacaaaatcagtttcagccccgcagatcagtagtccggaggagaccctaaatgacttactaaataacaaactggtgggtgaaatcattcacagcttgaagaaatgttcaagcgaggagaaggaagaggaaagtcaaacggcaatgaactactacaacaacatcacaaatgacatcatcagtgagcttgcaaatgacacacacaacaccaatggcaccaagtctcctgagtcttctttggcaaatgttttcattcaaggtttgattccaaattctgagtccggagtgattgatgattatatttttaatgatcctgttgtccctaaagcagatgatttcccatcagttcatcaagaaaccatcttgtgtgatttaaactctacagatgaccagaacattttagatcattccaataaaatggagcatgtagcaaaggcatgttcattttctgcggatccactagtagatgttaactccattacccatactagtttttctgttatagcaccagccaaagagatatttgaggactttccagttttacatgaaattgagctcagcgaagactctgttgaatctattgatcagtcaatagataattattatcatgaactctacagtatagagaaagaagtatcaaacaatagaacagatggtgcttctgaacttgaggaaaccagcgcaagtttgtctactgtcagagtgctagaaagaaggaaaggagttgaactggtcaatttgtctgtgtcctgtactgctacatgtttaccattttcttcaatgcaaaaagacactccggtgattccagggttttcaacaaaacaagcattgttcccaataacaagacaaccgttgggttcctttgaggttaactccagcaactctaacacagatgaagagagcaatgaaagaatgctgagcttccatcaggctaaagacaaattcaggaaagagttgaagtttgaaggtttcctctacagtgaccagccggtacttgcttctgatgtgccttatttccctcccgaggaggaacagacagaagatggaatccatttggttgtctgtgtgcatggactagatggtaacagtgctgatctgcgactagtaaagacttttttggagctgggattgcccggagcaaatcttgacttcctcatgtctgaaaaaaatcagactgacacatttgcagatttcgatgctatgactgacagactgattgatgaaatagttcagcacattcagttatataacttatcaatatccagaataagctttataggacattcattggggaccatcatcattcgatctgtgctcacccggccccgttttcggtactacctgaacaaactgcacacctttctgtctctctctgggcctcaccttggtactctttatagtaacagtactttggttaatacaggtttgtggcttatgcaaaagttaaagaaatccggatcgctgctgcagttgacgttcagggataatgctgatctccggaaatgcttcttgtaccagctcagccaaaagccaggtcttcagtattttaagaatgtggttctggttgcgtcgccgcaggatcgatacgtcccgtttcattcggcgagaattgaaatgtgtaaaaatgccacgaaggacagacacacaggacctgtatataccgagatgataaacaaccttctccaaccagtaatagactccaaggactgcactttgatacggcacaatgtgtcccatgctctcccaaacactgccaatactctcattggacgtgcagctcacattgccgtgttggattccgaactcttcctggagaagtttttccttgttgctggacttggatatttcaagtaacttctaattctgatgcaaaatgcaattggtcaccaaaaataggggaacttttttttcctttaatatgctaaaaatattctacaaatttctcttttggtgtatattttgcagaatacctcattatattgtttttaacatcatttaaatgacacgctgcctctaccagggtaactgcactagaattcaaaaaaaaaaaaaaa

SEQ ID NO: 402 - DNA, 2517 bp, Xenopus laevis
cttgtcctttgcatgaactctccggcctccagaggaaggaaggcacagccagacccactcgatggaaaacttgaacctcactccctgggaggcatggctgctgcataaagagagagaagggcgcgttgagttgcagaggaaaatctcggagcaattgaaacaagaggaagaactgttaaaagaacagcagcataaggaaaagaaaaaactacttgcagaggaacagcgcaaagaatgggtccggaaaaagaaagagcaggagcgaaaagaaaaagaagagagacttctgaaagagcaacgggacaaggaggcagaggaacggggccgaatctctgcacaagagaagggcaaagagaaataccaggcctggctgagaaaaaagaaaatggaggagcaagaacggaagagaaaagagaaggaacaagaggaaaagtccctgactgaagaaagagagaaaaaggacaaagcaagtcaagtgtttaaagagtggctggaacaagccaagaacaagccacgtccagtattaaacagctatggctacgtcaatgggaaactaacaggttattatgacgcaagctcctatcctgctccagcattctataatcccatcccgtggaaaccaattcccgtaccacctccacccaaagaagccaccaagaacgtctctgcaaagaagaaaaaaagaccggtttccagccagtcgtatcgaccaaacgtgaggtcaattaataaacctaaggacaatctccatgtggctgggagaatactgaaaagatgacggatatgctgtggataaggcttgttttgttcatccacagcaaatcattataatgttttaaaccatccagacaaatgcacaaccgctttttgttttgcaattatttaatatagtacaatatgggatcctagtgttgtttgagcatcaagcattatctctatatagatctggcacgtttcttctctacagtagtgcaatgcagaatgagtccttgttctgttgttggaatgagggtctcaccaatcctttcatcagtgattatggggcttcatactaagttagcagagcccaccaccctacaggcctcaactattaacccaccagtccacttaatcctcaggtggtggaccctgccaacaagtagcaaggggtccgagatgttaagggatacatgtgctgttgatatgggtgagttgtgttgtggcagcgccgcctgctggtcgttttcccaccggtctggccgccgggtggtcggggaggttgtcgggagggggggggaggcggctctgatgttcttctgcttgggaagaaaacctttctcaaacttttcctgggcagaggagcatcggggcggcctctttctttctcctggcggcttccttgactgcttggtggtcgggctggtgggggggtggccagcgggtggcgctgttgtggcagaatttattcatgttggcagtacatgtatcccttaatatcttggaattaaaaaataataaacaatgaatgtacattgcaaacattctcagaatagtactctcatcaattttacattcacttgttttaaaggtttacttatcctttaagactccattaaaccccactcgcaagtcctgttcattttgcaattctgcttttccatctgtcatgggaccccagagtccggccaaagaagccaagcctatattttactcactgattaagggaaaatacatttagtagatacagtagttaccttcccattgcaaataatggggtatatttaattctaaaatgttttttataaggatcctgaaatatccccatgttcataagaaattgcatatattcagttagtgatttccttagtcattttaaaaaaaatccaatttgatcttttaggagttatttattaaagtctaaatgccaaaaacttgaaaaattcacgtttttttttttaattaaattttttgggaataaattaaaccccaagggtgttaaaagtcagaataaaaaagtagtccaactcagacctgccgagttcatggagaaatcccgaagatatcccgatctgcgctggttttcgtgaaataatgcgaagatgtcatggttttcgggcatcaaatcttaaaaaaatgtgtacggtttgaattttttcgcgattttatcgagttttttttcctgcacaggaaattttcggaaaaatgtattgagaaataaagggaaaaaaatcagtgcggatctggtcggactattttaccgaaaattatcagaaatttagggggttatttattaaggtctgaatgccaaaaacttgaaaaattcactttttttttttactataaaatcaaagtttttagcggtttaatttttcaggaataaattaaaaccccaagggtgttaaaagtcagaataaaaaaggactccaactcagacctgtcgagtttatgtagaagttaagtttttttttttttttagtaacgatgaaagagaaaaaaaaaaaaaaaaaaaaaaaaaaaaaaaaaaaaaaaaaaaaaaaa

SEQ ID NO: 403 - DNA, 1654 bp, Xenopus laevis
cccacgcgtccgcaggaaggagaagggagagcagacgccgctgacacccgacacccgcaggacaaggggagctgcgagacggtatatgttgcagcaacaacaattcgtggactgagcggagccgggggatataaatccacagggcagaccctgccgttgccaacggttctctcttggattacaaaggttttagctggaaacttggaaattcccttgggagcagcacgttgggaaggaagtgaaaagatcctctgccaagatgcccatcctcaagcaatctggttcccattcaaagaagaaatcacgcattgatagagacatgattagtgccccattgggggactttaggcacaccatgcatgtgggcagaggaggagatgtctttggagatacatccttcctgagcaatcatgggccttcctctgcctcgcaagtagaagcccaagcccccaaaaagaacggccttatgacacatggttctggggagcaagaggaaagtaaaatggcagactctcttagtcagatttcacagtcctcaggaatagggtctggtgcaggaagtgtctcctctagtccaataaacaacatttcatctaaagaggataacttgtggaacagcaacgtaggacagagagatcagctcgactggctctcccctggaaaggactgtgggatgaagcatgcagagtctatcttgtctttccaccttgacttgggaccttccatcttggatgaagtgttaggtgtaatggacaaagatatttcttccagtgactggaataatacagacgaccagtttgattttgtgtacaaatgctcctcaactggcacagcagataatgaaaaatttatagaagcttccttgggagaaacaaaaggagtccactgtaatctgtcaaacactctgccaagcaccaacctcaacatacgccacaactccatccctacctctgaaaacccagaggctaaccaatctgcttatgagagtgacagcgaagaagaaaaacgctctatttatgaaggcatcgcagatgatccagagtcacacgacggccaactgcacacaagccaccgagtacaagtagaagaggacgatgatgacgatgatgatgatgacgatgaagatgcagggcagggatacacatttgatgaagaccttgatgatgaaattggtgtataggagtgaaaattggtttggtgaactctttatctactgcgcttacacatttgttggagaacagtgatcaaccaaaggtcaatcattgtaaatgggattttaaataaaactgtttaatagaactatataaggaaagcaacttaacaacccttttcctctcttggtagaactttgtacatagcccaatatatctggcttttggttaaaaataacttagacattaattgctggaaacttctatatacattcatgcgcactacaattatgttttcatttaatggattatgattgggacacttgagaaaaagatttatggaaaaacatatcagttctaaggacaatttaaaaaaaaagggttgctgatttttatagaataagaaagggcacagaagatgagacatgggatcgatttaggcacatatttgtctgttgttaaaaaaaaaagaaaaaaaaaaaaaacaaaaaaaaaaaaaaaaa

SEQ ID NO: 404 - DNA, 1792 bp, Xenopus laevis
ggcgccaagaagcttgttattagcagcgttgtgggacgtatctctttgctatggaaaagaaattggctgagtacaaatgtaacacaaatgaagcaatacaactgaaattagtgcgctttccagaagacattgaagatgagagcatgacatttaacccagagtacagccaccagatttttggtgatgaagaggtggcctttggatacaaaggcttgaagatcctgttgtactacagtgctgggaacttatctactatgtttcgggtgcagtacagctctaaagttaacgataagtttgatttggttcagccagatgatgttgaaaataaaatccatgaactaattcctgcaggtttctgcagtggtaccgatgattttataactttgttggaaaaggaggtgaattttaaaccctttggaaccattgttcatacttacactgttcacaatgaagatgctggcgaagatatctcatatcagatatacaaggctgacatgacgagtccaggctttcgagagtaccatgaaagactccaaaccttcatgatgtggtttattgaaactgctagctatatagatgtagatgacgagaaatgggactactttctagtatttgagaagtataataaggatggagctacactctttgcaaccgtaggctacatgacagtctataattactatgtgtacccagacaaaacccggccacgtgtaagccagatgttggttttgccaccatttcaaggggaaggtcacggtgcccagcttatggaaacagttcacagatattatgtatctgctcccaatattttggacatcacagctgaagatccgtcagaaaactttgttcgtctcagagactttgtccttgtgaagctttgtcaaaaccttccatgcttttctcctgaaaaacttttgtgtggattcagcaaagagatggtgacagaggctcaagaaaaactcaagattaacaagaaacatgcaaggcgagtttatgaaattcttcggttacgagcaacagacatgagtgatcctgagaaatccaaagcatacagactggatgtaaaaaaaagacttgtggggccatacaagaaaaatcagagagaaatggctaagatgcaacagtgcctccggccagaagagttgaccaaccagatgaaccaaatcgatctaaacacacagcacgagcagttagaggagagctatcagcagcttgtcgaggaatacaggcggatagttgaacggcttgctcaggcctagagctctcaagcatggtcacagatctttcacagtatagccttcagctttttctctgatattgccaacagactgtgatcttagtacagttctcaatgtactgttaatgttctcttggactttttgaactaccactgggcttgaaccttcagctgccttttattaatgttagatctgtttgcattcagagctgacatgcagtaaatattataatagcccagctctctcaacacttagttaactttccagggccatgcaaatgttatcatgggcgaaaagaaaaacctaaaaaaccaatgcttgggaatcagggacattaatcattaaagaccatcatcatctttacatgtttaccgttttataacagaagaggaaaatattttagtattatgctttgcagggtaaactgttgctgatatgtagtttgtattagacagaatatgtgttaatatgcagagagaccaaaatattacagcgtcattaaagtaatgttttcagtgcaaaaaaaaaaaaaaaaaaaaaaaaaaaaaaaaaaa

SEQ ID NO: 405 - DNA, 2659 bp, Xenopus laevis
acaatcccctttctggtgaccgccattttctccggagctgcagtgggaagtcgttgtatttacctgtcagtaaaatcgctgtcacatttttatccggtttgttcgttcccgcgagtacggggagctggtcaaagtctggcatctctaggctaatgtgcggccctagccgggaggagcatgtaccctaactccccgagcctgggccgcattccactgcccctaccctgtgaacagcaacaacaggcctccggttactcggacaaacttccagtgagtgcggccccggagctgctgagcccagagcaatttatccaggcttctctcaacatccagaaacatgccaatctttctagaatgctgatgaatggcaatgtgctgactgtgcctcccgtatcatcaccaccatgggcgtacctgaatcacagtcctttgatctcacctggatccccttcatcctcatttcagaacagaaagaggagaagcgacgagggaaatgtttcttatgacgtgaaaagacaacgatttcactctccacaagagcaaactgtaaatcaccaagcagtgcctttaagaggtgacctcagatgttcttacccaggatctccagcgttccctttgctgcagtcgccatcacctccagttctaaaagaacatgtttctaattcaggggattgctggttatatgaccacatagacaccactttgcctgttgctgaagacaagctgagccagcaaatactggacttgtttcaagcattgcaacagcaggtctgtgacataaagaaaaaagatatttgtcgggcagaactacagagggaaattcaacaaatatttccacagagcagactttacttggttggttcttcccttaatggatttggtacaagaatcagtgatgcagatttgtgcctggttttaaaagaggaacctatgaaccagcatacagaagcaactcagatactgggcttactccacaaacttttctacactagactatcgtatattgaaagacttcagtttatcagagcaaaagtgccaattgtgaagttcagggataaagtcagtggcgcggagttcgatttgaatgtaaacaatgttgtaggaatccgaaacactttccttctcagaacctatgcatacttagagagccgggtccgaccattggttctggtcattaaaaagtgggccaaccatcatggaataaatgatgccagtcgtggtactctgagcagctacactcttgttttaatggttttgcactatttacaaaccctacctgaacctattcttccatctctacagaaaaaatatccagaatgctttgacctatctatgcagttaaaccttgtccatcacgctcctcgtaatatccctccgtacctctccaaaaatgaaacacctcttggagacctgcttttgggctttctcaaatattttgcagtagaatttgactggagcaaagacatcatttcagtgcgagaaggtaaagcccttccaagatcagatgactatttgtggagaaacaaatacatctgtgtagaagagccatttgatggaacaaacactgctagggctgtctatgaaaggcagaagtttgacatgatccgggcggaatttttaaaggcatggggagcactgagggacgacagagacctatacagcttgttgcctgtgacggcaatcgtgaaaaaaatgaactctttatgaactggaatctgcagagaaatacaaactttttacactgcggcgtgatctccgagacttcccttgtgttgggcacctacatttgtgtcaagtatatttttattgtgtcacgttcatgtcctgtgttcgtccgtgttgaagaaatgctcaaacattgttttttgtttaaatacaaatattgaaccatttgtgttttttatttcttttatggttgtgtgctacggaataattgctctacacagactaatcccgtttattcacgttccagcctaatagaaacggctactgctgcctatttaatacttatccatgagaaaggtaattagaatatacattaaagcgtgaaatacgtttacctcgatagctgctgttactgttaattgaattctaaagctttgttccaggagaatgatggcagtgggatcaatttagcattgatcttgacaggcttgggtaaggagacgtggaactcaggatatattttgtcattaatacagtctgcataaaaggcacagcattttttaatgatgatgggaacgcttgcttctaggcacagaaaaaaaacataaagcttgctgtgtcacacctcacccgatgtggtggtatccattcttgcttgttggatcaatttttggttacaaacaacgtataatgactaattctgtcaccagagaggtttttaatgtttgaaagagacaaatcaaaatgtcacattccttttaaggtctcttaaattttactttttgaccaattaaggcacaatctggtgtctttggtcacatttgtgttgcagagtgacctgtttttccaatttcttgagatttttttttttgtttcctcttttgcttttttaattttttttaacatagagtaatgtaaacgtgttctgtgttttcttttgtatgatgttgaatggaataaaatgtatgtacaagaaaaaaaaaaaaaaaaaaaa

SEQ ID NO: 406 - DNA, 2780 bp, Xenopus laevis
gctgcctctgatgtcgagtgcccataacaaagatggagtctctggtgtctgtgtgtgcccagaagctggtgtgtgaccactcctccctccgccgggcgctggacctcatgcccaaggagttgtacccggctctgttcaaggctgcgttcctgggcaagaagactctggtgctgcaggacctggtgcagacatggcccttcgctgtgctcagtttccacaagcttctgaatagcaacaggcactgcgacccccaactggcgacagagaagcccagcaagctgtgtgtgcaaactgtcatcctgggggtcatcacctacctgagtgatgcgctcaccaagggccctgagggaccccaagctgggaggcagaggctgcgcctgttggatatgacggggatgcaggaggagggacttgagcagaaccccgacactatgagtttatggtctcgcactgtgactctggccaaagcctgtatcgatgtgtccaagcgccacagtgaggaggtgatgcaggtgtccaaacgtaggaggagctgccatattaacgctcttccagcctccagcccgttatacattgaagtgcgagtggacctctttgtgaatagcacttcctacggagtcctgcgggaggcgctcctggtcagctcacacagccccctacgtctgcagtgcagagatttccgggccgaggagctgtcgcttcgtagcactgcggggcttctcgaactgctgaacccggggagtgtccgtcagatagacctgagatttaataacctcggactctccggcctcaatgtcctcctcccgcatatggccaaattctcccacctgcagagcctcaaactgccatacagcaatgttgatgtgaggcgcctttcccctgtcatggaggaaggactgcagagcttcgcctctcaactcggacaactaggtgccctcaaagaactgaatctgggctcttcccgcctgtctggccgcttacgccagctccttgggggtttgcagagaccgctggagagcttggagttggccttctgttccctgctgccaatggacctttcctatctttctcagagttcccacatgtcctctctaaggaagctggacttaagtgggaacaacttgtctgaattcctattgactcctttcctgcaccttctggcggagatatcggggcacctcctgtacctggacgtaatggagtgcaagctggcggatgcccatctcagtgccttgatgcccattctgtgccgctgctcttggcttcgctacctcggtctcttttgcaatcccatctcctccgatggcctgagaatggttctgcagaacctggtccgactgcctgagttacatttggtggtttatccttttcccgtggattgttacagcgaccccacgcatttctcttccactgcagcctcgctggactcttcctttgaccatgagaaacttacacgtgttggggaggaactgcagcagatgctggtgagagcccagaggatggacatggtatggaccactgacatgtatgtgcagaggacactggactctctcagcctttaaccgtcccatacacactctacttccacttttctgtatgtacctgcaggggacgctggattttctgagcctgtaatcctcacacctaaagcacacacttccttctctatggttgtgtatggtgggcccaatgtctcccactgaatcccaacagtgcaacttcctctttaaacaggggtaccaaaccactcaggctcttctcatgtggttcttgcaacccctctgattccagtcctgtcttgtaaagttttccgcaactccattattttgcttaaattttctttataagaagaaattgttactcattgtttatttaattggacatatttaatacacattttatttcaattttttttctttttttctttgcattatgttggtcattgtgttagcagtatcaacaacttcttctactccattttctgggttatggtcacttctcattagccaactatacaactggggtcacttctcattagccaactctacagttggggtcactccattgtcacttctccatagccaactctacagctatggttactccatggtcacttctcattagctgactctacagctggggtcactccatggtcacgtctcattaaccaactctacagcaggggtcactccatggtcacttctttatagccaactctacacctggggtctctctatggtcacttctcattagccaagtctacagctggggtcactccatggtcacttcttattagccaacgctacagctggggtccctctatggtcacttctcattagccaagtctacagctggggtcactccatggtcacttcttattagccaactctacagctggggtcactccatggtcccttttcattagccaactctacagctggggtcactccattgtcacttctcattagccgactctacaactggggtcactccatggtcactttagccgactctacacctgggttcacttcatattagccaacgttactgctggggtcactccatggtcacttctcattagcccactctaaagttggggtcactccttggtcacttcacttaagcctatgacaaagtgtcccttggtgacacaaaatgagtaagacttttattttaatcattatggaaaataaacgtacatttttttaaatgttaaaaaaaaaaaaaaaaaaaaaaaaaaaaaaaaaaaaaaaaaaaaaaaaaaaaaaaaaaaaaaaaaa

SEQ ID NO: 407 - DNA, 9857 bp, Xenopus laevis
cgcgggtacccctctccctcacgcatagatacaccggaagtggccttggctctggctgctcggctgtttggcgccggcggagggagtccttcgtgcggctgaggaacttccggtcggcattttgttctgtaagggagacgcggatctcggaatccccggagcgccgcgtaccgaccgggccctccccttttcctcctccttcactgcctccgcctgagtcagggcccggacctttcttggccgccggtgcgtgggccgcactccgtgttgtgtgtgaggtatcggacgcccggggcctggtctcctccctcctgtgatagcgacggtgcccgtgggtttagtgcgtggcgcccgtaggaggctctggcgtttgtgctcggcgggaatctcctgagtcggtgctcggcggcggcgggagggaggggggcaagccggggggaaggagaaggagaaaggatcggctccttccccgctccccctctctctacatgtccgtgcctggccggattattctctcctttgcctcggtgtttgcttaaagacctcagtcctgttctccacccggactggaagccgctcaaccagtgtctaggatgggaagtaacgatagctggcactttaattaaaatacctgcgtagataccaccatcctacagcttcaggatgaatggggatatgcctcatgttcccataactactctagcaggaattgctagtctcacagacttattaaaccagctgcctcttccatctcccttacctgctacaactacaaagagcctcctgtttaatggacggatagcagaagaggttaactgcctcctgacttgcagagatgaacctctggtatcacaactaatccatagcctgaatcaggtgtcaacagaccacatagaactgaaggataacttggggagtgatgatcctgaaggtgatataccagtcctgctgcaagccactctggctagaaatcccaatgtttttagggagaaaagtttgcagaacagatatggagttcaaagtgggttaatgatgcctcagtataaacttccccagaattccatgcatggcagccctgcatcttccaattatcaacaaaccactatctctcatagtccttccagtcgttttgtgccaccccaatccagttctacaagccggtttattggtcaacagaacagccctgtgcctagtccatatgctccccaaagtccagcgggatacatgccatattcccaccctggaagttaccaacaacaaccacaaggttctgtttcaagccctatagttgcaggggggcttaggaatctacatgaaaacaaagttcagcagtcgggcagctctacgaaccatcatgcagataattccaggcatggcactactgaggactatctccagatggtgcaaaggctcggtggtgaggacagcgattcttcaataagaaatgctgcttcgttttctctccgatcccctcagtctgtgtgctctcctgctggaagtgaagggacgccaaaaggatcaaggccattaatactacagacacagccgcccccttattcctcgccccgcgatgctcctcctgatattctcttggactccccagatcgaaagcagaggcgaccaaaaaagttaaagttaagcaaagatgagaaggaacagactgaaaagtcagcaatgtacgatattattagttctccttctaaagactctaccaagctcactttaagactaacccgtgtgagatcttctgaaatggaccagcaaggagatatgctctccagtatggaaaacagtaacatttcagagggagatagctcattcaatgtgcagtttccagggaatgcgtcaaaaactccagtcactccacaggacttaagtcgccctttgaatgctgctgcttgttttcaggagcaaactgaattcttacaggtgcagcaagtgcctgttttacaacctcaaacgtcagcagctgcaaaaccgcctcaacctcttgtggctccgtcacagccccaacaaacaggaagcataacgccatatgacgaagtggaactggacgctcttgccgaaattgagagaatagagcgtgaatctgctatcgagagggaacgcttttctaaagaagttcaggacaaagataagcccctgaagaaacggaagcaggattcttatccattagaagctggaggtgctactggaggaaacagaccagcttcccaggagactggttcagctggaaatgggtcacggccagcacttatggttagtatcgatcttcagcaggctggccgaggagactctcaggcaactgtaactcaggactcggactttgccagaaaggcagatgacataaagaactgcaatgatggctatatttctgggcctcaggaggacactgttttcaagcataatcctgagaaccatccaatgccattaagaaaaaccgagtcagacatggaatgtcctgataagtctgtcaagagcacaactgctaagctgtcaactgaaagtggactagaagaatctcacaaagaaaataaattgtgtgacatcaaatctgaacctgttgagtgcagtgaagaaacaaaggtttctagtgactgttctatggaaactaagtctgaaagttgtgaaacagattatgatgacagtatgatggagtacaaaaccagcgaaggtttcaatgaaggtataaagactgaggcactgttaaatgaaacgtcaaatgatgtaaagttgtgtgacctacaagatgaatctaaagaaaatgaaaaccagagtaaatctagtaaagttgacaacagactggaaatgcgacagaaacttagtactcccaagcaaaagcagagcgatggacagccagaaacacctagacaaaaatttgaagggaagagtgaggcactaaagcaaaaagtggaggtaaaatccgaagccttcaaacagaaaacagagggaaaatcagatacaatcaggcaaaagagtgaggggaaaccagacacacctaagcaaaagacggaagggcaccctgaaacacctaagcaaaagaatgagagtaagtctgaaacacctaaacagaagagtgaaagtaagcctgaaacacctaagcaaaagaatgacggtaagccagaaacacctaagcaaaagagtgatagatcggaaacaccaaagcaaaaaagtgaaagcagaccagacactccaaagcaaaaaaatgaaagcaggccagacacccctaaacaaaagattgaagggcgtcaagatacacctaggcagaaaggtgaaggtcggcaagaaatcagccgacaaaaaagcgaggagcacaaaagtgatgggcgtcctgaaaccccaaaacacaaacatgatatgaagaaagatcccaacagactgtcaacagaaaagaagccagatttatccaaacataaaacagattcaaaatgcgactctcctagagttaagccggagagccgcacagatggagcaaaacagagagtagatgggagacctggtcatgaatcttcaaagcgggacggtgagaacccaaaacaaaaacacgatgacaaaggggaatctgagaaacacaaaggagaaatgtcaaggcttaggaggccagagtccttaaggtcctttaataagaatgaccaggaaacaagacctggaagtaaaccagatacaccaaaaatggataaagcagagaagaagcatcggcatgattcggatgactctagagagaagcattcttccggagagcaaaaaccaaggcctggtagtcccaggataaaacaggacggtaaatcaacccctagtaaatcggatcctagtaaatcagatcctagtaaatcaaaatctgataaacctgtgttgaaatctcctgctagtaaagatgataaaaggattgatgttaacaaaagtaaagtggaggggaacaaaggtcatagtgacaacaaaactgggttccctagttatttgttggggggaaatcagggtacactgaaaaactttgtcattccaaaactgaaacgggataaggatggcaatattacccaggagtctaagagatcagagtcaaaaggcgagcagaaggacaagccagaaaagatgggttttgtggaagatcttaataaaggagctaaacctgttgttgttcttcaaaaactatctttggatgaggtacaaaaactaatcaaggagcgggatgacaaatccaaaggatcattaaagtccaacaagaacagaccctctaaatccagcaaagggggaatcgatcagtctgtgctgaaggaacttcctcctgaactggtggccgagattgaatcatccatgcctctctgcgagcgtgtgaaaatgaacacaaggaaaagaagcacagtaaaagagaagccgaagtacaccgagatcagctcgggagaggatgaagaaagtgaggaaacctttgaaccttcacgtaaaagacccaagaaaggcaaatcagatgcagactggcaatatgatggtgaccgcgagcgaagaagttctggtgaccatcgtcgcagtggaaatgactccaggagaggcagccgttacagggagcgaagtgcagatgattcagaaatggaagagtctccaccaccaaggctcagtgaagttgccagaagactgaaaaaagagcgtcaaaagaaacggaaagcctatgagcctaaactaacacctgaagaattgatggattcctcgacatttaaaagattttctaatgctgtggaaaatattttagaaaacttggaagacatggatttctctgcgtttggggatgatgatgagattcctcaggagatgctcctcggaaaacaccagctgagtgagttaggaagcgaatctgccaagattaaagctatgggaattacgaataagatctcatctgaaaaaatggtcaagttactaggcatattggagaaaaatattcaagatgggtcaaagctgtcaactatgctgaaccataatgacacagaagatgaagaaaggctgtggagggatctgattatggagagagtcactaagtctgctgatgcctgcttgacggccatcaacatcatgacatcaccaagcatgcctaaagcagtctatatcgaggatgtgattgagcacgttatacagtacactaaattccatttgcaaaatacactttatccacagtatgaccctgtttataggttggatcctcatggggggggattaatgagttctaaagcaaaaagagccaaatgttcaacccacaagcagagagtcatcgtgatgctgtacaacaaaatctgtgacattgttgctagcttatctgaattgttagaaatccagctccttaccgatacaaccatccttcaggtgtcttctatgggaattacaccattttttgtagaaaatgtcagtgagttgcaactatgtgctatcaagctggtcactgcggttttttcaaggtacgaaaaacataggcagctcattttggaagagctctttacctctcttgcaaggcttccaacaagtaaaagaagcctgaggaatttcaggttaaacagcagcgatgatgatggagaagcaatgtacattcagatggtgacagcgttggtgttacagttgatacagtgcgttgtgcatttaccctcagacaaagatcattcagaagaggagtccaacaaaaaaattgatcaggatgttttcattaccaactcttatgaaacagcaatgagaacggcacagaacttcctctccattttccttaaaaagtgtggaagtaaacaggcggaagaggattacaggccattgtttgagaactttgtccaggatcttctatctactgttaacaagccagagtggcctgctgctgagctgctgttgagtttattgggaagactactggttcaccagtttagcaacaaatcaacagagatggctctgagagtggcatctttggattatctggggactgttgctgcacggctcaggaaggatgcagtcaccagcaagatggatcaaggatctataaaccggattctgaagcaggctccagaaggtggtgatgatattcagcagctacaaaaggcactgctagattatctggaggaaaatacggagactgatccatcattagtgttttctcggaagttttatatagcccagtggtttcgtgacactacgatggagacagagaaagctatgaaatcccaaaaggatgatgactctgagggagcacaccatgcaaaggaagtggagtctacaggagacattatgcatcgagcagagaagcggaaaaagtttcttcgaatcatcattaaaactgccccatctcaatttagcactttgaagtcgaattcagacacagtggattacgatgatgcgtgtttgattgtacgatacttggcctctatgaggccgtttgcgcagagctttgatatttatttgactcagattttgcgggtacttggggagaatgctattgctgtcagaacaaaagctatgaaatgtttgtctgaagttgttgctgtagatcccagcattcttgcaaggctggatatgcaaaggggtgttcatgggagactaatggataactccaccagtgtccgagaggcagctgtggaattgcttggacgctttgtgctctgcaggccgcagcttgcggagcagtattatgatatgctcgtagagagaattctggacactggtatcagtgtaaggaaaagagtcataaagatcttgagagacatctgtttggcgcaaccgacctttcctaaaatcactgaaatgtgtgtaaaaatgatcaggagagtaaatgatgaagaaggcattaagaaattagtcaatgaaacattccagaagctctggtttacgccggcgcctcagaatgataaagaagcaatgacaaggaaaataataaacatcacagatgtggttgcagcttgtaaagatactggctatgactggttcgaacaactgcttcaaaatttgctaaagtcagaggaggatgcttcctataaacctgtgaagaaggcctgtactcagcttgttgataatcttgtagagcacatactgaaatatgaggagtctctagctgattctgacagcaaaggtgtaaattctggccggttggtgtcttgtataaccaccttatttctgttcagcaaaatcaggcctcagcttatggtcaagcatgcaatgaccatgcagccgtacctaaccactaaatgtatcacacaaaatgatttcatggtgatctgcaatgttgcaaaaattctagagctggtcgttccgctgatggagcatcctagtgagaccttcttagcgacaatcgaggaagatcttatgaagctcatcattaaatacgggatgacggtggtacaacattgtgtcagttgtctcggtgcagttgtaaataaagcaacacagaactacaagtttgtttgggcctgttttaataggtattatggtgctcttttaaagttaaaaagtcagcatcaagaagatccaaacagtacagtcctgaccacaaacaaaccagcacttctgcgctcactgtttaccgtcggagcactgtgtcgccattttgatttcgatcaggaagagttcaaaggcagcagcaaagtaaatacttcggttaacatcaaagataaagttttggagctcttactgtattttacgaaacattcagatgaagaggtgcagacaaaagccattattgggcttggtttttcatttattcagcatccagttctgatgtttgaagtggaagtgaaaaatttgtacaacatcatactctctgataagaactgttctgtaaatttaaaaatccaagttctcaaaaacctccaaacctacttacaagaagaagatacccgtatgcaacaggccgatagggactggaaaaagatgtcaaagcaggaagatttaaaagaaatgggcgatatttcctcagggatgagcagctcaattatgcagctttacctcaaacaggtcttggagtccttctttagcactcagtccagtgtacgccactttgccctaaatgtcatcgcactgactttgaaccaagggctcatccatcctgttcagtgtgtgccatatctgattgcaatgggaacagacccagagccgtccatgcggaacaaatcagatcagcagctgatagaaatagacaagaaatacactggattcattcatatgaaagctgtggcaggtataaagatgtcataccaggtgcagcaagcaatcaattcgaatgcaaatcagattgtgcgaggattccgtcaggatgaatctaatagtgctttatgctcccacctgtactccatgatccgaagcaaccgccagcacagacgagcctttctcatctcgctgctcaatctctttgatgatgctgcgaaaacagaagtgaatatgctcttgtatatagcagacaatctcgcatgttttccatatcaaagccaggaagagcctctcttcatcatgcatcacatagacattacattgtctgtgtctggcagcaacctgctgcagtccttcaaagagtcaatggtgatggccaaacaaaaagtgaaggcaccatcatctaatgaagacagcagcagcgaaagtgacgaagtcagtcgcccaaagaaaacaaggcggcgaggaaactcggaatctgactccgatgcagaagatgatgtggaatatgtgctgagatgcctcccaagtaatgcttctcccctcattgagtttgcaaatgcctcccaaggaatcctattgctactgatgctgaagcagcatataaagaacctttgtggattctcggacagtaaaattcagaagtattccccctctgaatctgctaaagtgtatgacaaggcgataaacagaaaacaaagcgtccatttccaccctaagcagacccttgagtacctaaagaggaatatgacttgtacgaagattaacgatgaagtcaagaggtcaattgcaaaacaatatttggatttcaaaatgctgatggagcacttggatcccgatgaggaggaggaggaaggagaagtatccgctagcacggatgccagaaataaagccattaccaatttactgggaggtaacagtcctaaaaacaatgtggctgagacagaggaggaagaaagtgatggggaggagaaagcagggggcacatcagggctaagaaaatcaaaaagattatcggattcttcggatgtggcagtgcagatgaacgaaactgtagatgtccaagacgttattgcaatttgtagtccaaagtacaaggatcggccgcagattgcaaaagtagtgcagaaaaccagccacggcttgagcattcgatggatggccggctcctacagtggcacctgggccgaagccaaacgccgggacggcagaaaactggtgccttgggtagacactatcaaagagtcagacattatttacaaaaaaatagctctgacgagcgctaataagctgactaataaagttgctcagactttacgatcgctgtatgcggccaaggacgggacttccagctaatgaatttgtatatttgcagccaaaatctacaggaatccagaaacagacacaaactcgagaaaaacaaaacaaaaaaaaaaatctccgcattctggcaaaaacaaacaaaaaaatccctaaacacacacacccacacaaacaagctcatcagttttatcgaagcgttaaaaaaaaaaacaaaaaaaacgggaacttggccgtcagaaggaaatgtttggtaaacattttgtgggagcttccttcgctgttgtacagcagaaaaaccgtctcagttcatttttactcccactgtattatagtttaacaaaaaaaattgtttatatcttggagaatactttctgttt

SEQ ID NO: 408 - DNA, 426 bp, Xenopus laevis
atgtcgggggtgccgctattcccggaggccccgggagtggaacgggtgtcccgggcccccagttccccgcgttcccccgcccggcgcagcctgtttggtccggtagatcacgagctgttggcccgggactttgagcggagccttcgggcgatggaggaagagaaacgcgagaagtggaacttcgacttccgcaactaccggccgctaccggggccccttcagtggaaggaaacggaccaggcgcctgaattctaccaccggggacaccagcacaaatcacagcggaccgagtcgagtccggccgaatcccgagcgaagaagcgcagcggagaggcagcgggtgagtccaagtgcgcccgggggagggcggagccacaagctcccctgatacttaacttcaccctgctgctgctgtcgtcgtcttaa

SEQ ID NO: 409 - DNA, 1586 bp, Xenopus laevis
tgcagttgcagacgccagtcgctgtgcattgtgtgtgtgtcggtggctgcaggcgaggcatgtttctccggcccagcatctgaggcagtgggacaagtagtccggttagtgagctggacttgtgtctaatttggggggaggacattgcatctggtcagacatctccccctccctcctgactcggtgctgcaggcagtgtgcgatcatctcgctatgtcggatgacgattccagggccggcagcagcagctcctcttcctcgagttcttccggccagcagcaacagcagcagcatatagaaaggcaggagccggccaataacaacggtaacaacaacaagaagaaggagaacaagggcagcagtatgagcaagaactccaagctgctctccaccagcgctaaaaggattcaaaaagagctggcagatattaccttggaccctccaccaaactgcagtgctggtccaaagggagacaacatttatgaatggagatctactatccttggtccaccaggatcagtatatgagggtggtgttttcttcttggatatcacattcacacctgaatacccatttaagccaccaaaagtgacatttcggacgagaatttaccactgtaacataaacagccagggagtgatctgtctcgacatcctgaaagataactggagcccagcactcacaatttccaaagtcctcctgtctatctgctctttgcttacagactgcaaccctgcggaccctcttgttggaagtatcgccactcagtacacgaccaacagagcggaacatgacaaaatggccagacagtggaccaagagatacgcaacatagaccccagccttccctcaaacacggctgtttgtctgacagagagagctgcttgttcatttgaaggggaaatggagggtgggagctggtaaagaatttctataacagattttattcagccttttatttccagagttttgttattgtaatttaaggtatctttctgcagcagctgcttagactgagcagggacatctttgtaattcaagaactatttgtcttctaatgaagtaataagaaggcagatgtttggaagagatgggcaaacaagaaatgtaccttgtgcagtgagtgacactgcatataaatgtaggcatttgtgtaaagtccttgtaaagtattgaattgaatggagtttattttgaaccttatttgtgtgtatgtaaaagagggctatagactgagaccagcataaccctgtctctaccaaagagctctgcagtggggattgtgaatgtcattccctggcataggatatgaatgtctggtttgtcttgtgtattaagaatccctaaatacactttatatatatatatattttatccttttgtatgtgtgtgtattaatctgaagcgttaagttaacaggacctgttaggatatacattaagctgtttaactgtaaaggtggttaataattactctgtggatttcttatatgtttcagacttccgtctgcatttgttactgtgctaataaaagtgaaaaaaatacaaagataaaaaaaaaaaaaaaaaaaaaaaaaaaaaaaaaaaa

SEQ ID NO: 410 - DNA, 592 bp, Xenopus laevis
  modified_base (203)..(203): a, c, t, g, unknown or other
  modified_base (215)..(215): a, c, t, g, unknown or other
  modified_base (386)..(386): a, c, t, g, unknown or other
  modified_base (399)..(399): a, c, t, g, unknown or other
  modified_base (458)..(458): a, c, t, g, unknown or other
  modified_base (462)..(462): a, c, t, g, unknown or other
  modified_base (488)..(488): a, c, t, g, unknown or other
  modified_base (493)..(493): a, c, t, g, unknown or other
  modified_base (498)..(498): a, c, t, g, unknown or other
  modified_base (505)..(506): a, c, t, g, unknown or other
  modified_base (514)..(514): a, c, t, g, unknown or other
  modified_base (533)..(533): a, c, t, g, unknown or other
  modified_base (544)..(544): a, c, t, g, unknown or other
  modified_base (547)..(547): a, c, t, g, unknown or other
  modified_base (552)..(553): a, c, t, g, unknown or other
gagggcctgctgcaggaccccatcttcgctatggggccggaggagctgcgggcgccgctgggggattcccctgccagacccggcccaaaaaaagaagaagaaggagaaggacgaggaggaggaggcccccccttgcccaccaatcgggagccacccggccctgctggccctattggagcgctgccgcccccgattggccgaancccggaaccacntggcccaggtggcgctctggctgcagctgcaggtgccccgcatcgaggacggggataatttcggggtggccgtgcaggagaaggtcctggagctgctgaccgcatcccgcacccaactcgaggggcttcagggccgcctgcccaagtacctgtcggagcggggcgacgccntgtccaaggcggncaaaaacccccacgtgttggattaccgggccctggtccacgcccttgacgcgggcgaanttgngggcgacgcgcctggccctgacgganctccnggganctcttannccgtgctncctcgacgtcctgcagaanaaacatggganaangttcnncaagccccgggggggggagcccaaagcccattgattttt

SEQ ID NO: 411 - DNA, 2094 bp, Xenopus laevis
caaaacataaacaggcagaggaaaagcagcgaggcggaagggctaaatatccaagggaacatttattcagtttctatcaggtttataaaacacaatggaaatagagacaccaagcgacataaatgctaatgtagagtctgattctgaactaagtggagtagagcaaaacaggactgaagaaaatggcgatttggccgaatcttccattagtgaagccagacttaatgccaaagcgcagcggcgcctgaggaagaattcttcccgagactctggaagaggcgactctgtcggtgataatggggacagcacccgggcagttctgcccacaagcccaaagtcaaaacttatggatagaaaatcccgaactggaaaaggaagaggcttgccaaaaaaaggaggagctgggggtaaaggagtgtgggggacacccggacaaatttatgatgaagaaattgttgatatcaaagatccaaattatgatgaccaggacaactgcatgtatgagaaaactgttcttcctctagatgaaaaatcctttgagaaatcagtcactccaattgtgcaggaatattttgaacatggggatacaaatgaagttgcagaaatgttacgagatttaaaccttggggaaatgaaatgtggcctgccagtgttggcagtgtccctcgctctggaaggaaaagccagccaccgggaaatgacatccaagcttctctcacatctctgtggaactctacttagtactgaggatgtggaacgatcatttgacaaactcctccaggagctgccggaactggttttggatactcctcaagcaccacagttggtgggacagtttattgccagagctgttggagatgagatcctgagctccacttacttagagggctacagagggacagtggattgcattcactctcgtgcggcattgaatcgggcagcattgttactgcggatcacaaagggaggaagaagaagaatagacagtgtttggggcactggcgggggacagcagccagttaagaagctggttaaagagattgacatgctgctgaaagagtatgcgctttctggagatgttgtagaagcagaacggtgcctgcaggagctcgaagttcctcactttcaccatgaattagtttacgaagtgataatgatggttttggaagcaactagtaacaacacatacacaatgatgcttcgtttgctggaagccttgtggaagtcaggtgttataacactggaccaaatgaaaaggggatatgaccgaatatatcaagaaattccggacattaacttggatgtacccaaggcatattctgtactggagcgatttgtggaggattgctttaaagttggaattatttccagacaaataagagacctctgtccttgcagaggaagaaagcggtttgtaagtgaaggagacggcgggcgcctgaaaagagagagttactaacaatcggcagcctccctgtctcccatgatgaggatgaagaaggattttgtggggcttttctacttaagatgtaaatgttatgggtaacagcctttaaataaccgtttttgttatgtcacagattcagggtcatttacatataaagctgctcaccccaacaggggagaatttgtataagctgccccctctgaagtgccattagcttctactctattccatgctctgcactggtgtacacgactgtaaaatcacgattaaaacaaagctctttataacacgggaattacttcaacccaggtgcctccaggctgttgggggatgctggtagttgtagtttaacagcacttaagaggccacaggttgtgtgtatctgatttaacccctctttggctgctgcttttcaaaaccttgactttggaagtgggatataaattacgttctgttctctgtgtgctctggggtcccaatggtttgttagggttaataataaagggatgggaatgaatcttttgttcagaatatggtggctggaacatctatttttctacaaaaaccaaataactggaaattcggagatctgctgtgaatgtgcaaataaatacaaataaatattgcgagtgaaaaaaaaaaaaaaa

SEQ ID NO: 412 - DNA, 1315 bp, Xenopus laevis
gggggaatgaggttagcggaccaagatggcggctccttatgtttccgatgactccgggaagtacatagcatccactcagcgaccagacggttcctggaggaagcagagaaaagtgaaggagggatatgtgccccaagaagaagtaccagtgtatgaaaataaatatgtcaagttcttcaaaagcaaaccttctctgcctcctggtctttgtgaagccgatggcactacaggccaagcccagccttcaaagcctgatgctgacgccagcttgtccaaaacagccaagaggaacttgaagcgcaaagagaaaaggaaacaagagaaaggggaacgcgagcaggtggaagaaacacgacaagatctggagagggttaacatttcagatacccctgtgcaaaagaatgtgacatcagcacataagaatggctcagcaagcagtgacaactctgcagcagagaaggccaagaaaataaagaacctacgcaaaaagcttcgtcaggtggaggaattacaacagaaaatagactgtggggagatcatacagccatccaaagagcaactcgaaaaactggccaggaggaaagctttagaagatgagatagaggacctagagctggacttataaagcactagtatgggtttggccttcatgttctggaacagggaaatccaaccacagcagtccagctgttcgtgaactacagttacccctgtggtatgcgttttagttcagcaacagcttagacctgccggttggtagtctttgtctcaaagcgtggtatgcctttaacctagtcttctacttgtgtccttttcatcatgtttcagtgcagtttatttcaagttagcatttttgtgctgaaggacctccatgccttactgccaccccaaatgtagatcctcctctcccttttttttatgctctgaagttgcctttaaatataatttcaaacagattttagcccactaaaggataattcagtttcagaaaatacttcttaacgagagacatataaagccttttaggctgcatctccccacttttcaaaatctccaacatttcccacaatgctattcttgagcatagggtaaatgcacatgtgtgtgaagcaataagtttaagtgtttcatttgaatgtattcctttgtagggaactggaacttttggtttgaattcaggttgtggtaataatatgttccccttacacttgacagttatgtggaaaagaccccatgtaatgcacagtttctcaaagcaagaaaaaaaaagtagtttataaacactgcaaaaaaaaaaaaaaaaaaaaaaaaaaaa

SEQ ID NO: 413 - DNA, 957 bp, Xenopus laevis
ttttaagtggtgcttcaggttttcagaggtttgtgacttactttggcattgctaggacttgctagttcttggggcctaaaatggatggtgaagcaaaatctccatgcagtgaggccttagagggcaaacctcctgtgcaaacaaaagaatctggatccctaaagtcaatcttcttaagagttactcagatctggcctcttaaatatgtgttcaagatactgaagaagattctgtccctagctggactttctccaaaaattgaaaatgtaggaactgcagagtctaaatctccctatggcagacgatttgtgagtggaagaaaaaggcttggccgctttgctcgtcttctgctctcacttgcccctcaaagactacagtgtgctctgggctaccactcagcagaaagtatagggcagtctgcagggtcagatgatgtcaggaagtctcctctgaagccatgtggaaagggcagcaagaggaagcaagatgatcttgaagtagaagagcaacaaagctgggtggcattaatgaatgaggatcttccagatgaagatgaggaagatgatccaacttatgaacccagtaatacagacacagacagtgaagaacaccattccaaaaatgacacagaaagtgatcttgaagttgaggaaaaagaaggggtcgtgatgctcaaggaatctccagcaaagaaaccggaggccatggtcaatggtgacccatcaaataaggaggaaaagcaaattgatgaaaagccagccaatgaaaatcagaaaacagatgacgaacagcatactaccaacccttctgcagaataactcgtgtggcatacataccagcttgaatggttcatctgcattctctgagtgctatttctgtattatatggacacttctcttgccaacttttttgctaatgtatcaataaatatttttcactgaaaaaaaaaaaaaaaaa

SEQ ID NO: 414 - DNA, 1920 bp, Xenopus laevis
caggactgagggagagagagagagggcttccagagcactttaaagctacactttgactttcaacctctgagaaacgggatgatactttacaaaggactgggaatccaggccatttcaaggcaattgcatgcttgacattagcctttatgagccgaaccttatcactcagtgcctaataaatccagcactgaaagaatgtggccttctattctgcatgagtgttcttattctatgctgccagtttactgataaggcacaaaacataacagcaaaaaaaaaaatattttagttagaggaaaatcatgaatttcactactctgcaatagcttgatccttcaaggcatttaaaccaagtgacattaaataaacatgtctcactcggagaacaaaaccttgtttttgggggtgcttgctggtgcggctggcctcagcttgacattgatgttgctgaaacgcaacagacctcgttacctccaaggtttatctgagatatggtcttctgtcaaagagccttcttctgcacaggacaaccaaggagcagttttgattcttcaaggtagacagcttcagatcctggacaaactgggtagcttgttgaagagtgtggaagaactgaaggaagaagttacgtttctaaaagagacccttccaaagcttgaagagcagatacgagatgagcttagagggaaaaatgatgcacggaagatcagcccccagcataaaggcattaaaagaaagaaaagtgaaacaactaagggagcagttgagtatcctagctctgaggaggctgagagtgaaggagggtacataactgctcacactgacactgagcttgaatcagatgaagaacgagggctgaagcatttgaatgcagaaaatgctaaggttacagaagagaaagcagagttactttctgttcttcaccaggcagatgctggacattgtggttctgaatcagaaaaacaagaaacgtttcgaatgatgcttgttcatgaggaaaagtatggaaatactgtggattttctttggagactggcacgggcatatggagatatgtttgatatgacatctgatgttgaagaaaaaaaaaactatgcagctaatgggaagagttttgctggtaaagcagttcaattagaagaatccagtgcagagggccatagatggtttgcaataatgtgtggctacttgtctgagtacgaaagtgtacaggataaaattaaaaatggctatctctttaaggagcatctggataaagcaatagaactagatccaaaggaccctctacagtattacttattaggcagatggtgctatgcagtttctcagctatcttggattgagaggaaagttgctgccacactttttgggaatcctccaactgcaaccatacaagaggctttgcagaatttcctcaaggtcgaagaaatgcatcctggttactccaaatataactacgtcttcctggcaaagtgctacaaagatctcgggaagaaatccgttgcttaaagtactgtgatgaggcatcagcaataacgtctgctaataaagaggacaaagatgctcagaaagaactggacaccctgatggcatccctgaagcagtaatataagcacattttctgatgcaaagcaaacatatacataacaatacacagatgtattttgtccaattgagtaataattcagtatgagacctattatccagaagctgaggttttacggataagggatcttttatgtaatttggagctccatacattggctacttaaaattaatttaaaaaatagacccaataggattgtttgcctataataagaattaattatacctttgtttgaaacaagtacatgatactgttttattattacagagaaaaataaaaaaaacattttcaaaatctgaaaaaaaaaaaaaaaa

SEQ ID NO: 415 - DNA, 1466 bp, Xenopus laevis
gtcgctgtgctcagaatgccttcggaaaaggatcatattaacattgtcgttattggtcacgtcgacagtgggaagtcaaccactactggtcatttgatttacaaatgtggtggaattgaccaacgtacgattgcaaagttcgagaaggaggctgctgagatgggcaaaggctccttcaaatatgcctgggtattggacaaactgaaggcagagcgtgagcgtggtattacaatcgatattgccctgtggaaattcgaaaccaccaagaaggttgtgaccgtcatcgatgcaccaggacatcgtgatttcatcaagaacatgatcaccggtacatcgcaggctgactgtgccgtcctcatcgttgcggccggtactggagagttcgaggctggtatttcaaaggaaggtcaaaccagagagcacgcgcttctggcgtacacccttggtgtgaaacaaatgattgttgcggtgaacaagatggattccacacagccaccgtacagtgagtctcgtttcgatgagatcaagaaggatgtctccgcgtacgtgaaaaaggttggctatgacttgaaatgtgtcccattcattcccatctccggttgggctggtgataacatgatggagaagagtgataacatgccgtggtacaagggttggacgatggagaagaaagactccaagaagacaggacatacgctgtttgaggctttggatgccattgacccaccagagcgaccaacgaacaagcctctgcgattgcccctgcaagacgtctacaaaatcggtggtatcggtactgtgcccgttggccgtgtcgaaactggtgtgctgaaacccggtatggttgttaccttcgctccccacagcctgtcaactgaggtaaaatctgttgagatgcaccacgaggccctcactgaagcccttcctggtgacaacgttgggttcaacgtgaagaacatttccgtgaaagacattcgccgaggtaatgttgccggtgacagcaagaacgacccacccaaggctgctgaatcattcaacgcccaagttatcgtgctaaaccaccccggtgaaatcaaggctggttacgctcccgtccttgattgccacactgcacacattgcctgcaagttcagcgaactccttcagaagatcgatcgtcgatcgggtaaggttctggaagaaagccctgccatggtcaagtctggtgatgctgctatcgttctcatggtgccaagtaagcccatgtgcgtggagaccttctctgaatatcccccacttggtcggtttgctgtgcgtgacatgaaacaaacggtggctgttggtgttatcaaatccgtgacgaagaaatccgatcagtcgaaggccgtgaaggctggcccgaaggcagccaagaagaagtaaatgcttttgtaacagcgctcagcaataaacctaagtggaaaaaaaaaaaaaaaaaaaaaaaaaaa

SEQ ID NO: 416 - DNA, 1667 bp, Xenopus laevis
ccaattcaagatgcaattattgaaacgaggcttggaacgcaaagagcatatcggaagcaggaagtgtttttcgcaggcatggctgatataccagataatgcaccccagcattgcccaggtacagacagtactgaggctggcaagagttctgcgtgccagggatgccccaatcaatcaatatgcgcatcaggagctgcggcaggaccagacccagctatagaagaaataaaagaaaaaatgtcattggttaaacacaagatattggttctctctggaaagggtggtgtgggcaagagtacattcagtgcccacctggcacatggtttagcccaagatgagggcaaagaggtggctctgcttgatgtggacatctgtggaccatcgattccaaaaatgatgggcttggaaggagaacaggttcaccagagtggatcaggatggtcaccagtgtatgtagaagataacctggctgtaatgtctgttggattcttgcttagcagtcccgatgatgcggtcatatggagagggcctaaaaaaaatgggatgatcaaacagtttttgcgagatgtggactggggtgatgtggattatctgatagtagatacccctcctggtacatcagacgagcatctttctgtagtacagtatctcagtgcagcaggaatcgatggagcagtaatcattacaactccgcaagaggtctcacttcaggatgtccgaaaagaaatcaacttctgccgcaaagtaaaacttcccattataggtgtagtggaaaatatgagtgggtttatttgtcctaaatgtaagaatgaatcacagatatttcctccaactactgggggagcagagaagatgtgcactgatctcagtgtttctctactgggcaaagttcccttagatccaaatataggaaagagctgtgacacagggaaatcattttttactgaaattccagattccccagcaacattatcctacagaaaaataatccagagaattcaagactattgtgaaaaaaagaagtgacttccttttcccaatggtacagagaagttctgataagcagttttgcattatgccacagattacggattttttgcatttcactgttaccttaagagaaaaatcagcgttaaaaaataatttcaatgtggaaataatgcactaggccatgtatcacttaagtggtatcctagccagtaaatcaaagtatttgttaccagctgtttaccttctctttcattttgctggccagagcatgaacgggaatgttgttacagccatggggttgcagggcacaagcagcatcgtttagaaacaaaatatgtatttagaacctctaatttaataataatagtaataatattttctttataaaaataactctaaacatatctgttttatagcactatttaggagaatgattttttgtttcggatataccatataaactttaaaaatgtaattgctgtaggatatgattttgaaatgcacaactgctagaataaacctttatgttgcttgctgccagtcttgctttagaaattactattatattagtagatatttgggacgttacattcgttttgcattgcaataaagctcatattaaaggacaaaaaaaaaaaaaaaaaaaaaaaagaaaaaaaaaaaaaaaaaaaaaaaaa

SEQ ID NO: 417 - DNA, 3758 bp, Xenopus laevis
gtgtgtttatctctaagactcacatgaggttgtagtggctgggcggcaggatgagcagccgggtgtgtaagaactgtggctgtacggatatagacgtagatgcggctcgcggggatgcggtgtgtacgggctgcggctcggtgctggaggataatatcatcgtttccgaggtgcagttcgtggagggcgcaggcggcgtttcctcagcagttggacagttcgtctcgtctgaatgttctggtaaaactccatcactgggaacaggatttcacaccaatgtgggaaaggagtctcgtgcacaaacactacagaatgggaagcgtcagattcacaacttgggagtccagttacagctaaacaagcattgcctggacactgccttcaacttctttaaaatggctgtcagcaaacatctgacccgtggtcggaagatgacccatgtcatagctgcctgcttgtacttggtctgtaggacagaagggacgccccatatgttacttgatctcagtgaccttcttcaggtgaatgtgtatgtccttggcaaaacctttcttctcttagccagagaactctgcatcaatgctcctgctatagacccatgcttatacattcctcgctttgcgcacttgctggagtttggtgataaaaaccatgaggtgtcaatgactgcactgagattggtccaaaggatgaaaagagattggatgcacactggacgccggccatctggactttgcggagctgcactgcttgttgcatccagaatgcatgactttcgacggaccattaaagaggtcatcagggtggtaaaggtgtgcgagtccacactgaggaaaagattaacagaatttgaagatactccaacaagtcaactgacagttgatgaatttatgaaggttgatttggaacaagagtgtgatcctccttccttcactgctggacagagaaaggttaagagacaacagcttgaacaagagttgtcaaaaaaacttgatgaagtagaaggggaaataacaagttatcaagatgaaatagagaatgagctggagaatagcaggccaaagctgaaaggaatgtatgcttcatattctaaagatgatgcagaagacaacacttctagcatacttggagaagaagatgatgatgaagatctggaggcagccgctaatcacttaaacaaggatttttacagtgaacttgctgatacatctaaacgtgtttatgaacacacagtgaagccacttcctatagaatctctactaggtcctctccctactgcagcaagcttgggcattacagactccatcaaggaatgtatagcaatgcatgaacaagagaaaagtgacaatgcaggagatggtgaacttgaccttaatgggattgatgacaatgaaatagataggtatattctaaatgagaaggaagcggaaataaagacagtgctgtggatgaaagagaacgcggactacctccgagaacagaaggaaaaggaagagcgtattgctaaagagaaggagcttgggatttacaaagaacaaaggcctaggaaaccttccaagcggagggctccaatccaagccagcactgctggggaggcaattgaaaagatgttggagcagaagaaaatctccagcaaaattaactatgatgttctccgggacctcaacagtaaagggagcagtactccaaagcaagataagaacgatatggaggacggtatcaatagcaaccaactctcccgcaggaaatctgctgccagtagaagtctgtccaatcctgtcagcaatgctgccaaaaggataaaaccactggtttcctcgcagccatctaagaaagtagctttggagcaggaagtgataaatgaaccggagtcgacacctccaacagtagtagtggagagtgggcctgttgcatacaatcatgaggaagatgcagaagaagaggaggaggaagaggaagaacattgcgtaagcgcacttcagttaatggggggaaatgattacggctgtgaaatagaggaggatgaatactaaacgtcatgacacacatgcaaaatattggtccttgcttgcaagtagatttgtatatatggacttgtacttccatgctgttctgtgatcagcatcatttcaaagaggacagcttgagttttgtactaatttaaaaaaaaatttaacgtctctgttcgggtcatttcacgttgaccttaaacccttacacatttacttggtttgtagtacttgaatttttgttttcaattttgtgataatgttatagtatattggttcttgcttagatgtaaaatacaattcaaatgtcctatgtaaatcagggagctgttccaaaaaaacaactgaccccacccacttgtctgtatagatgtatagctgaattgctttaatatatgtatataaatctatagatgttaaggtcgtatcacatcgccatccttccactgagacattcacaggcaaagaagccctgtggcaattcagttatgacaaggatcagaagatacgtttttgcatgacagctggcggctgcttctctctgaaccgaggctttattatcaggctaaagcagtgcctttgaggtgcagacagactgtaccatttgtaagacattgtatttacaaagttcttcttctatgaaactagtagggaaaggacttgcagcaccgccttctactgtggagatcaacagaaaaaaattaatcattttaataatatatacattttctgttttgatgctttgccagcttctctattctgaatagcatgcaaaggtaatgagtgcagtatcttgatctagattgctgtctttccttaacaatatatatccggtaattagattccactgcctttttaccattctgcatgtgtcagttagacatgcatttacaccattcattaattggcctgtgtgtattatgcagcatttctttgtgtttgtaatatgtccgttagaaagagctgcctttgaaagagctccagcgattttatccaccctagggctcacagagcagcaactgtataactatgtataggaaagtaatgtgagcgcaaaacaataagtatatttttacacaataaatatggtcattaaaaagtaaggctatggaaactcccctaaccaatacattaacactgaggtccatcttaaaaaggaagaatgcactggattactttcaagtgtattttgactaactgcagccatttactggataaccccacatcatgttctgggagaggccctaattgtaggtagaacaagttatttagtccaactatggacttctagacgtgggtagaaaggtgaaggtcacctgtaaagtattgcacctatgatatgtatatgttagattaaaaatgtatttcttttatggtaaagggacacaaccatgcagtagggtgtgccaataaaagctgtcgtgggttactttcagatggtgctggtaaataaaaactggagacttgcaggttaggatagaagtaatgggctccacatagacattttgctcaaggctccacaaccactgactacagccctgattctcaaaatcatgaagacctcgtgcttgatacagttatggggagagtatgaaagtttttttttgtttttgggagcccagtctctcgaaagtgtttttcttttgtgctgacttattagaaattctcttttcttaaaaaccaaatatgattaatatattgtcacaaaaactccctatagaaaatgaaaaaagaaaaaaaaaaaaaaaa

SEQ ID NO: 418 - DNA, 3217 bp, Xenopus laevis
tgcacgcagcacgggatgagctccttgcggaaacactgacaggggagggagatgcctcgggacgagatgagttctctaatacagaaggtggctcgccaggcccggcagacttttcgcagcacaggaggaggcggcgcgggtccgtcggcggagagcttgggacagctgcggaaactcgtgagtcaggtgcgggcggaagatgtgggtctgggagcgagtcggccccggagctcgggagggaagggcccgcctgtgacttacatgcacatctgtgagacgtcgtgcttcagcatgggagtgttcctgctccgccccggcgcctgtatcccgctgcacgaccacccggggatgcacggcctgctcaaggtgctttacggcaaactccgcattaacggcttcgatcgtctggaagcgtcagagccccccgaagccctcgctttctcccctccgctgctcccctatcagtacaactctgtgcgccgggcagcgctccgctccgtgggggagttcggggataacagtcccccctgcctgttggctccgcaccgggagaacctgcaccagatcagcgctgaggatggacccgccgccttcctggacatcctggcgcccccgtacgaccccgcggatgggagagattgtcactactatcagctcattcaccccgccgcctcccccgcacctgcctccgccgctgcccccggggaaactgagggacccgccgccgcttcggataactgtgccgggggagccgcccagaaggaaatctggctcctggagatcccacagcccgaggatttctggtgcgggggagaagcctacccaggccccaaagtgtctatatgatcattgttattatccaaacacaactcatctactgggacagcacagaccccccaacagctttccctcaggtgatcccaccaatctcctatacacaactcatccatagggtctcagcacagacccccggctaatgcaaatggactttacagccagacccccagtagggccacaagtttcatttgtgcgtggcccctgcaagtcatcaacatggtcttccctctactaccaggcaggctacggttatgaccctcactagccctgatagggcctccagaagcttcatcagaagggttgtctactgcacagaactcatctgctgggtgtcactgcacatgcccaactaccacaaaaaggacagtaagctactgaccctctgtcatcctgacccttggttgtaatagcgtaaagaactcatctgctgggtctcgctgcacaggtcccactattacaagcattctgaccctcactagcccgggaaacttaatccaaagggccttcgtctcctaccacacagaactcttctcctgggcttccctgcacaagcccaactaccacaaaaaggacagtaggctactgaccctctgtcatcctgacccttggttgtcctagcataaagaactcatttgctaggtctctctgcacaggctccactacttcaagcattttgaccctcgctagcgctgatatgagctccagaagcttcatccgaagggccttagttgcctaccacacagaactcgcctgctgggtctcactacacaagcccaactaccacaaaaaggacactatgcgtttcagaaggggcattggtcatcctagagcaaagaactccggggatccagaagcttcaccagaagggccttcgtcgcctactgtacagaactcatctgctgggtcttgctgcagaggccccactactacaagcattttgaccctcactagccctgttgggggttccacaagcttcatccgagggtcataggtcatctgctggctctggctgcccagctcccacttcagaagtatgggtaaatgggagactccacatcttcaactgatggtcagtttgtttgctacagaaaactcagcagttatggttggcccttacagggcctgaaagtatcaatcttatgggcacatgttcatttgtaattcaataactcatatgctgggtcattctgcacttgttccagtagtactaagggtagtcatgagcctccttattggccacatcttcatcagttcgatgttccacgtcacatctgggttcactggcatagaccttccttccaactacatccggaggagaactctgtccttacatgggccacaatgttcctcagtgatccctatttgtctacacagaaatcatcagctagcagcccaaatactacaacacttcaacctggggcctcaagaatccactttacccctcttttctgacttcattgggtcctttctacagtgatgaacctaaaggattgggtttctgacttcataagattttcactaggcccaacttctgaaactgactgcccatagatctgaattgttgacccttccatgaatattccaacggccactttgcaggaataaccatggtataggggtgtagcatggtgcaactgtcatctgaaacacttaggggggtatagagggccagttaaattgcaatgtaaactatattatgtggggcaggctggctgctatttgattggggtgtaaagtcttgtaaaccacacactacccttgtatatagtcttaaaatgacgttttacatttccaaaaggcagttttacctctttttgggttgtcaagtataagcatgtatgatttgtccctaaaaaggacatgttaactcttcagcacttgctaaggatgcttcaagttgcttagtccatcttgaactatatatatatatatatatatatatatatatatatatatatatatatataaaataaccctatctttttttaatttaaaccagcagatacccccttaatctaccccagcctgcccctttggattcctaattacagcacttattcaaaagccacccttctccactttttcttcctctaatgccagtgcttcccaccaatcctatcagccggattttgcggattagaagtaaagtttgggttgctgtgtagccctccggctgctgttattttattaaacagatgtttgtgtaccttctctttgcaggtggcttcttgtaacacataacccagtgctgtctgccagttcccattggtctgtaacatttctcagcctgtagtctcatgacatcatcagtacggaaatggattaaagcatgattgtttaccagcaaaaaaaaaaaaaaaaaaaaaaaaaaaaaaaaaaa

SEQ ID NO: 419 - DNA, 2524 bp, Xenopus laevis
gcaaactattcgctggagcgacagtcatgtcggagagcattgtaattcgcattcagtctccagatggcgttaagcgaattaatgcaagcaagagggaaactgcagtaatgtttcttaaaaaggtagctaaagagtttggcttcacaaataatagattttctgtatatgtgaacagaaatcggacgggagaaatttctgcttcccaaaacaagtccctccatttccttaaaatcaaacatggggacatgctgttcttgttcccatccaactctgcaggcccctcctctgaagtcatggatacaagtgcaacagttccttgttcccagcctattggctcaccacaggtggtagaggatgaaattgaccaatatctgagcaaacaggatggaaaaatctacaggaacagagacccacagctgtgtcagcatggccctatgggtaaatgtgtacattgtgttccactagagccttttgatgaggattatctcaatcaccttgatcccccagtcaagcacatgtcattccacgcctacatcagaaagctgacaggaggtgcagacaaaggaaagtttgtggccttagagaatataagctgcaagatcaaatctggctgtgaggggcacccaccgtggccagaggggatctgtacaaaatgccagcccagtgcaataacacttaacagacagaaatacaggcatgtggacaacataatgtttgagaatcacaccattgcggatcgcttcctagacttctggcgcaagactggaaatcagcgtattggttatctatatggccgatacactgagcataaggatattcctcttggcctaagggcagaagtggctgctatctatgagcccccacagattggaactcagaacagcctgcagctacttgatgatccaaaatctaacgtagtagatgggattgcagccaagcttggactaaggaaggtcggctggatatttactgacctggtttctgaagacacaaggaaaggtacagtccgttacagtaggaataaggatacatattttctaagtgctgaagagtgcattacagctggctattttcagaacaaatatccaaacctgtgtcgcttgtcaccagatggacattttggttcaaaatttgtgacagtggtagcaacaggaggaccagataaccaagtacactttgaaggatatcaggtgtctaaccagtgcatggcacttgtacgggatgaatgcttcctgccctgcagagatgctcctgagttgggttatgctaaagagtccagcagtgagcaatatgtaccagatgttttttacaaggacatagacaagtttggtaacgaaataacccagctagcacggcctctccctgtagaataccttatcattgatatcacaaccacctttcccaaggatcccgtctacaccttttccacttcctgtaatttgttcccgattgaaaaccgggatgtcctgggtgagacacaggactttcacagtttagccacatatctttcccagaatctgccctcagttttccttgacatcatctctgacttccatttgctccaattcttggttaccaatgatgttatgcctttacaggacagtataagtttgctcttagatgctgtacggaccaaaaatgaagaacttgccgaaacttggaaaaaatctgaacaatgggctaccattgaacagctttgcagcacagttgggctccatccctcagaacttcatgattatggcaccattggaggagcctcacatgctgcatcttcatccatgtggtcttgtttgcactgcaccttcatgaaccaggcgggtacagaccaatgtgaaatgtgccgacttcctcgcacctaaagttaggttgcagactaggggacatgccaacaagtcctccaatagggagcaggtccctgaagcaaattttctgcaagtccctccccatccctttcatgttgctttaggactgacagggagaacttttggctgcaaaacttgctttctcacactctgccatcagagccaagggtaatgtttttacacactgaggcagtccacagctggataccagaatccttttgtgttttttggggttgagctcccaaatgttcatccctctattaacccatattcaaagcattgtctgcaatttgcattggcagtaatgtaaaactaggacagttactaagtcccatttactatgagaacttcaatggaaacaataaatggaaagcacttcttaatctaacaattctttagatgttaatttattggtcaccaattagttgaaagtgctgaacccatgtgctataaacatagagattttcggtctcccacagacggatagggcaatgattttatatggcgagatgggttttttttgtgcatgtcacatctcatgtgtatttaaaaaaaagtaatgctaattacaccaaaatatacattcaatataaatgggcacatacattatttgaaaaaaaaaaagaaaaacaaaaaaaaatataaaaaaaaaaaaaaaaaaa

SEQ ID NO: 420 - DNA, 1502 bp, Xenopus laevis
ggggtcgtgacagtgtgacaggttaggctgcagcactgagcggattatgttgcggcccaaagcgctgacccaggttctgagccaggccaacaccggtggagttcagagcactctgctgctgaacaatgaaggctctctacttgcatattctggttatggtgacacagatgcccgagttacagctgctattgctagcaacatatgggctgcctatgataagaacggccaccaggcattcaacgaggacaatcttaaactcatccttatggactgcatggagggccgcgtagcaatcacaagagtgtctaacctgctgctgtgcatgtatgccaaagagactgttggatttggaatgctgaaagccaaggcccaggcgctggtttattacttggaagaacctctcaaccaggtgtcgtctgcctaagagaagcagcacagtgtatgtcagaatgggaaatgaactgtatggaggctactgagcccctgcactgacggaggagcattatctgaagcagcagcacttctgtagtctgtcacgtgtctcatgtcttccccctggccccggcaacagcgaagcccacagaaaccccctggcaacacaaacctaccttactgtaagggctttgcttttatatgtgcttctatatgtgcttctatgaccggggcggactgcacaatcgtatgccattggaatctatagatcggttatatactgaactacagttcccagcatccctcctcagcccatgctgtcaactgcagttcttttcatatacacacgactggatcaccatttgttcactgaagaagatgaatttgtatctttgctcatcatttataaacccgtcccataatttggatcttcctagataacaggtttctgtatatggataggattactcttcatcttcccatagatcgtataatgtagggggtacaacttattgggccattgaacattccatctctggatttttaactattaatgggggctgccctgttccttatctcagcagcagtgaatctgctccatagactctctctctgcagcacctctagtggccataagctaaaagtgcacttagcagataaataggacaataaaggcctaaggtacttatttatcagaagatgaaatagagctggtcatacacaaattctatacgacaaatcgcttcttcctcgggccgacggtctccccaaactgccttcccctgggggagggcacacccggtgcttcgtcttcccaaagttgcttcacgaggaaacaggcgaccaggaaggcgaggcgcagcgtgtgccttcccccaggcgattttcattttagccggcagagggcagggggaaggcagttcggtgagattgttgccctgaagaagaggagatttgtcgttggggtgactaatctccccgaatctgctcgtgtggcctgaaccttattgtggagtattgattaaatggttgttggggctaaaaaaaaaaaaaaaaaaaaaaaaaaaaaa

SEQ ID NO: 421 - DNA, 1129 bp, Xenopus laevis
gaaacagtcatggcgtcgacgagtcgcgtcgatgcacttccaaaggtcacttgcccaaaccatgctgatgcccttttggtagaagattatagagctggggatatgatctgttcagagagcggattggtagtgggtgatcgcgttgttgatgttgggtctgaatggagaacatttagcaatgacaaagctgctaaagacccttctcgagttggagatgcacaaaatcctctcttaagcggcggagacttgactacaatgattggcaaggggactggcgctgcaagctttgatgaatttggaaactccaaatatcaaaatcgcagagcaatgagcagttctgacagagcaatgatgaatgctttcaaagaaataacaactatggcggacagaattaaccttcctcgcaacatagttgatcggactaataacctatttaagcaggtatatgagcaaaaaagtctaaaagggaggagtaatgacgctatagcttctgcatgcctctatatcgcctgcagacaggaaggagtccctagaacatttaaagaaatctgtgctgtatcaagaatttccaagaaggaaattggcagatgttttaaactcatcctgaaagctcttgagacaaatgtggatttgataactactggagactttatgtccaggttctgctcaaatctgggccttaccaaacaggtgcagatggcagctactcacattgcacgtaaagctgtggaactagacttggttccagggagaagtccaatctctgtggcagctgctgccatttacatggcatctcaagcatctgctgagaagagaacccaaaaggaaattggcgacattgcaggagtagcggatgtgaccatcagacaatcttacagactaatatacccacgagcccctgacttgtttcctgcagacttcaagtttgacacaccagttgacaaattacctcaactataaactccgctctgattggttctaaaatatattgatattttacaacctttttatttaaatgtgttgatattgagccatcagaataaaattgggttatttgctgcaaaaaaaaaaaaaaaaaaaaaaaaaaaaaaaaaaaaaaaaaaaaaaaaaaaaaaaaaaaaaaaaaaaa

SEQ ID NO: 422 - DNA, 3661 bp, Xenopus laevis
agaagagatacacaagaaggagacacaattagtgagaaattcagaggttctgaactgtggggagagtgaaaatcaagctggaaaccccagggaataaacaagcgaagtagaacttctatgactgtcatagatataactatctacactgactgtatatcaggatggggctcagaagatcttggttttacgggaaatatcaaatgattcttctgtctattttgacaatgcagtggaagggcaggaattgtgaggaacagaccgaggaactaccagggtttaaaatcgaggcaccagtcaatgtgatagtacagaggggactctgtgtgctcatcccctgtaactttactgttggtcccaaatataacttaaccaaagatgccattggaatctggtataaaggacatcccaatgacccagttgcagcttctaccaactcctctcagttccctgatacaacaaacggccgctttatattcactgggaaagtgagtgcaggagactgttccttctctatcagtgatgcacaaccaggagatgcagcaaagtatcggttcagacttgaggatagagatccattaaaatttaattatcttcatatccagccttctgtatctgtgacagaagaacctgaaatatctcccactggggatctgatcgctgataaagaagtgactgtgacttgcacggctcctacaaactgccctggactctctccaaacttcacatgggagggaagtgtaaatacagacaatatacagaataatacatcgaggcaccaaaatgggaccgtcacctaccggtcaaatatcactttcactccatcaccgagacaccataattcctccttaacctgcacagtgatttatacaaatgagtctacgaacaccaacatcactttgaatgttgaatatccacccactctgattatctctgtttcaggtgggacaggagagagcagccgcctaatcatgagagaaggagactctcaggaaatctactgtaaagtggacagtaacccaacagccaacattatctggactagaggaaagagccctgttgagaatatccagcagaatggacagaatgtgactctgtcactaaggaatgttacagagaatgacagtgatacatatacatgtactgcacagaaccaacgggggaacaacagtcgctctatcagtgtctctgtggaatctttacaaaagcctcagacaaatttcctcattgttggactttgtattttatttctcacacttgtggtggtaatagcggtgtttgtgttcagaaggatgagaaagaagaaggacctacaggaggacaggactactaaagagatgcctaaaagtgatagtgatgggatttacaatgatatggacaatatgaaaatctatgacttacacattgacatagaggaagcaaaactggataaagattattctgatctgcatataaacaatgaaacagaggtgcaatattcctcccttgatttctcaaacataaaaccaaaggaagatcctcaaacagagatcatatattctgaggtcaaacgcaagtaaccctgggcatatactgaaaacaatgcatgaatgtaaataaaggactgttctgctatagagacttgttaagacaatgtctaattctcagggactttttttctatgactactaagtgcctgatacactggtcctttctgactattacataacagaggccacagaagcacggcattcttcctgaatatggctgcactttcttcttttcacataaactggttctagactgtaagcttgcacaagtaaaacacatgcaaatgttctcaatgtattgttggacaccccggtgtattggggagctacgcaaaaacctattattttggcatattcaaagtaaacttttgaagggcactacattgcaaggtgttcatagtaacatcaaaagcaataaaaatatggacacttaatgcattacacaagattacacgtatttaggggtaaaagagtctttagtcagggctacattggagcatctccatgcactacgcgtttcatgccctaaggcagtgatccccaaccaatagctcgtgagcaacatgttgctctccaaccccttggatgttgctaatcagtggccttaggggagggatttttgcgcccagggggtttccttctcctttaaggcaggtgcttatttttgaattccaggcttggagacaagttttggttgcataaaaatcaggtgcactgccaaacagagcctcaatgtaggttggcaatcaacataggggttactaaatggtcaatcacagcacttatttggcagcccaagaacatttttcatgcttgtgttgctcccaaactccttttacttctgaatgttgctcacaggttctaaaggttggggatccatgccctaagggctcatagtcatgggcccatgatcagcccataatcatctcatgattgggtgcccttagggcatggggcgcgtagggcatggagatgttttggtgtaggtttgaattcagatttttttacttttaactatgaaacctttgtggagtctatcgagtgcccatacttttattgctttcagtaaaggctgctcctcctggactttttctactgggtgggtgtttttggtgcccctttatgctttctacaactcttcaccaaaacatcaacacatttcccccttaatattgtacattttataatctttaaagaaaatagcatataggtatgggatcatttatctggtaacctattatccaaaaaacccgaattacgggctcaaataaatttcattttatctaaataatccaaaaaactatttccattttcggtgtaataataatagttttttaaaacttcggataatggaaaagatccattatccgaaatagccctggtgttcttttatattttgccacataataaatatggtttaataaaatgatcattaaagaaacattgtttgttttgacctgctttaattgaattttatatatttcctgatcttacaagaattggcgatttaaggacatatggtgtgcccatgatggcacttacttttccatattgcctctctagtttataactagtgatgggcgaatttattcgccaggtgcgaattcgcggtgaatttgcgcgttttgccgccagcgaataaattcgcgaaacgcccacgaaaattcgcggcaaaaattcgccagcttaaaaaaaaattttgccgaaaaaacggacaccggcgttgaaaaaaacgggcgccggcgtcaaaaatgggcgccggcgtcaaaaacgagacgccggcgccgtttcacgaatttcgctaatttttcggcgaaactgcgcaaatttgcccatcactatttataacaaataactcaaagtgctcactgatatttaaggccatggtggcaatttatagtacagttatgtagagttgtagaattgtagacttgtgctttcttcagtttaattgcacttcactagtcagtctatctccaatttgtgaatcttttgatgaacataagtataacttgctagtatggtatagtttttattactaaattagactatgcacattgtaagtaattctaccatttaaaattttattttttaaccaataaatatgtttttattgttgtaaaaaaaaaaaaaaa

SEQ ID NO: 423 - DNA, 1115 bp, Xenopus laevis
gggggagatccggcagaggttcagctggagtgagaacaggggtcggtgttgcgggctgggatcttgataaaaccaggaaacatgatttcagaaggaggttcgtttatgcggggcatgttgataggaggaggcttctgtgtagtcatcacgcttctgggacatattaaagttggacatgaacatggtatctcccatgaacatcatcacattcaggcaccagataaggagcaagttaagaagctgtcggaagcggaacgtgtggaactcagccagagcatgcgtgtgtattgtataatccttgtaaggccaaaagacttaagtcaatgggctgctgtccgtgaaatctggagcaaacactgtgacaaagttgactactacagctcggaaccaatgaaagtgtttgactccatttctgtcgacaccaatgacatgtggacgatgatgagaagagccatccagaaggcctatgagaacaacaagaacgagtacaactggttctttatatgcacgccttccacctttgcagtgatcgaaaacctgaaatatttcctactccaaaaagatccttctcagccattttacatcggccacactatgaaatccggagacttggactacgttgatatcactggcggaatagtattgagcattgagtcgctgaatcgcctttccgccgttttcgaggagccggagaaatgccccgagcagggcggcttgatatttaagatggccgaggataagcagctggcgatgtgtctcaaatacaagggagtctcggcagagaatgcagaagactccgaaggtaaagatgtcttcaacacgaaatctgttggctcgctcattcaagaagccatggccaaaaatccccagaaagtggtggaaggatgttgctcagacatggcaatcactttcagtggtatatcccccaacgtcatgcacgtcatgatgtacggcgtatacagactgagagcatacggacacactttcaatgatgctctagtttttctacccaaacctgactctgacaacgattgatgtttgggaatcatggccgtcatcacttcccgctgagatttttttcacacaaaaaaaaaaaaaaaaaaaaaaaaaaaaaa

SEQ ID NO: 424 - DNA, 3585 bp, Xenopus laevis
gcacaggcagggggaagtagggcagaagggcaataaaagcaggagaactacactgacagaggctgcgagacagacatagaaggagaaaggctggggagacagtgagaaaaagactggaagagacatacagagggcatacaggcaggtggggagttactttattagaatagtcaggcaggagcaagtatacagggtgtgactgtggataatccacggtgtaaggaacaacctggagcagatttagaaaaatcaggggtttaagtcagagacagccagggttctcgggagaggaaagagacaggggtcgcggcaggagcacttagctgacagacctacttgccaccttgatttagtcagtaagtaagatggtgcttagtgagcacctgctggtgctgctgggcgcggtactgtgcgccccagctctatccgacgtgttgttccgctgccccccgtgttcccccgagagactggccgcttgtcctggcaacagtccccgctccccgtgtgcagagttggtgcgtgcgcctgggtgcggctgctgcccggtgtgcgcaaggctggagggagagtcgtgcggggtttacactgcgcgatgtgccggagggctccgctgttatcctcacccaggatcagagctaccactgcaggcgctggtcttgggactgggaacttgcggcaagaggagagacgcagagtatgggagcagccaggagcggggaacagagctgccagaggaccagtcggataacatgcttgttgataataatttggttgctgggccggcagttcccggagacttcatgccgaggaaatcctcaaaagcccatgcggtgaatagggagagagcgaacgagcaacacagatcgaagaccaacaaaagcgaggacaagaagagaccagccaggagcctatgtcagctgcagctggaccaggttttggaacggatctcgggtatgcacctccctgatgacagaggtcccctcgagcacctttatgcacttcccattcctaactgtgacaagaacggattctttaatctcaaacagtgtaagatgtcagtgaatggtcagcgcggagaatgctggtgtgtaaacccaatcactgggaaggttctgcctggatctcccactgtccgaggggaccctgaatgccatttgttttatacaaacccagaggaggagcgccgagcacatacccagcgagctccataagaagatcagaagccagtaccggcaatcccggcctgcccaccgctggctaatatcacagtctttgttttcatgcacattggatcaaacaatcaccattgttgcaatagctttgaaagtgggaattggctggttgatgtattagccgaaaacctcactggagtttccatttacttaaaaaaacaaaaccttttggttcccaaaatccaggtggttggattaacagggaagggaggatttaggaaaataagtcagagccagccagtaagaccatcccaacttcataagccaatcaggatggatttagaaagtaaaccaaataaccagccccttgggtgtcacagaggttgtgttaatgttacacaaaacctcgctggcaccaagggatataaacaccaaaatatattacccccccccatgctgcaggttatctaagcaatgaaagcgtgagcatgtcttttctcttgccatgttccattctactagaatcgactagaacccattcttcctccttatcagaaaccagttctcaggggagttctcgaaccctatttattacacaattttggtgcaaattccaatttccagtttcaatactttgatcttgtttaaaacaaagtctgggaatgtgaaagggcaattttaattcatatctttccatgagtttactgtgtgtttggatgtatttactgactgcaattacaggcaaaaaagaggttacagcacccagggggaatgaccttgaaactgtaccttaaatagacaatgcaaaagtaaggaaacaacatcgtccccccctacaaaaatatgcatatgagtgagagctgccatatttactggtatacagtatgaccactgggggtgctgtataaatgcatatacatagacacacaataagctatacactcatactctactttctaaggaaaacaatatggcacctcctatgcatatgtataaatgggcacacgataagctataccctcagacagtagcagctaacatccctatagaagtatgtgcacactgctatctatatgttataatttacagtctctcctgcagcagaggcatctataatgtcaatgtgcatagtttaacacagcataactgtgtatcaaacaatttccatgtatctgaggggtttgaaataaattctaatgaataggaaagaaatgataagggcatgaaataaaagtatagtcctctgtggttacgctatgtttatgtagagagtagtgttttcttatggagcagagctaaatgtgttcatttctgcgctgagagttgctgtgggttgggatgggcttagctgtttagatgcagcacaagtctaattgaactgccaattagccagtcagtatttagagtttagacaatatgacacatttatagggggttggtttgcagttcattgtaactatgtaacacattcaaaaaggcagttagggtgctgggagttgtagtaattatagtcttcagggctgttggttacctaaacaagatttaatgtgtcctctgtcttagaacatcagtgttaatttgtgcaaccaagaggtttaacagcaggttactggaccaaaaatgacaacataagttttctgtgaatactgggagttttcgtgtagaagccaattgaggaacatgaaccttcttttgcctttcaccctcttgagctttttctatgactctattatacttgtctgcaggatatttaagtgctttcttctcattcagatctataggttttttcgagacagtacatgagatgcattctaaacaaataccactagatgtcagaatgtgtgcagcgatttcatagcagagagaattagaaccggttctgctcagtcagggatgttccatataaatacattgcacaaataattctataggaagtagataactgatataaacctggcctagacccaaatcaaggaaatgaactgtttatctacactaaaaaccataaatcaatataatgggacacataaaatccaaatgatgcatggttaattagcaagcagagtacacctatatttctaattagacagaagaagtgggtttaataagtgtctagttttaaaggttgaggtgggaaactaagaagctggctcatagacatgggggcacctctatgtactagcaatgtatcaaataaatacatgtattagaactcctgacctaagtatacattgccttaagacagaggcagcagccaataaactaatttgttgacattgttggatgagtttggcatgagagtggtgtaaatatgatggtactgactgtaatgcactgtgcagcaatgtataattacactgtgtatcctgctataaagtcaataaatctcttgacaagtaaaaaaaaaaaaaaa

SEQ ID NO: 425 - DNA, 1223 bp, Xenopus laevis
cccacgcgtccgcagttgtagtgagagacacagcactgaggtattatttccactggccttgtcatcccctcatagttttacaatgcctgaaggaaagactgatatggagaggattggcctcttcagtgagatgggctacaccagcattggagataaatatgctgcccctggctccaaaccttttaatgaatctgccagtaagaacagacaaatgcttcctggaggctccaaatccatggctaatatgctggggggatactttgatggccagttcaaaagagtttttgaaggggaatcatactctgatcctttcaagcaaagaagacagcatcgaatgcaacagagcaagaagaatttggggaagcccttcctcccatccagtggagagaaaaagcgatctggattgggcagcttctatggcacattaggaggtccggtagtagcatttagtgctgagctaaaatcaaggaaagcatacactgcaccagggaaaaacttctacactaatcctccaaaagacggcagtggatatggatatcccagtgtaaccataggtaaaccatacccatactcctctgaaaattatgacatctcaagagagctaataaagaaggaaattgaacatcacaaatcaaaactgaagggaggagcttttaaattaaacctacatccaaaagattattttgagccaaacccttactatacagataaaactctgccaccacttaaggttcattctcaaaaaaaagaaactgaaaaaccttttaaaccaagttcaccagctaaagaggctggtggaatgaaagctggaacctttgacccataccctactcactccaatgatccttacacagcaaagccttccaaaactcctgtcaaagaaagaaaggttttccatcctccaggtggaccaaaaacatatccagttcacagtattttaacctcaaatgtaataaagtcagtcactgcgttaaattacaagactgtaaatctagcgtcatattaggtgttcaacgaatcagcagaatgtaaatgaataaatgggatgtgtgtgaggacaatccctgtgttttgttttatacaccacataaatatattttttaaagtaattcataggaggattactgaaagtcttaatgtacgttacttctaaattatttacagtgtcaccttatggtctgaggtaaaaataaacaattttctgattgaaaaaaaaaaaaaaa

SEQ ID NO: 426 - DNA, 1013 bp, Xenopus laevis
gtgatgcgcagagctgtgtgattgcgcagggctggtgagatgtttatgacaggaatatttcaaacatggcgaatttggagaaatctcctgcaagtgttgacagattcatctgcatatatccagcttatctaaatagcaagaaaactattgctgagggaagacgcattcccattgaaaaggctgtgcagaacccgacatgtttggagattgcagatatatgtcgtgccaacaagctgaatgtagttgtggagggggataaaatgtacactcgggagtggaacagagacgcacagtttaggggaagagtgcgggtgcagcttaagaacgaagatggaaccgtttgtgtggagaaactttcatcaaggaaagccgtaatgctccgagtagcagaagaaattccaaagctgaagaccagaacacagaagagtggagggggagaccaaagtgcccagcagggagaaggtggcaagaagaacaaaaagaagaaaaaatgatttgtctctgctggaaataaagacattgaactgagtgtgagtggtgctggactcaaggggaatctaacactccattgatatttgtggaaagtcacatgtttcagagcttaaacgtgtttagtaaatacagctctgtttgattataaaggttcattaacacagaaaatcctgggtttgttttccaaaaactcttctgaaaggaacagcaatgataatgttcatcacacgtttaataaaacagcaagaggcaatcgtttcattcaagcaaggccgttgaatactctatggaaatgctgtttttattttcttctccctaataccatattgttttaatgactttttgtttttgagcagaaggcagtgggtttaaccataaccaaaccataaatgtacccagcgtctcaaaggaataaacagtcaaaatgtgtgaaaaaaaaaaaaaaaaaaaaaaaaaaaaaaaaaaaaaaaaaaaaaaaaaaaaaaaaaaaaaaaaaaaaaaaaaaaaaaaaaaaaaaaaaa

SEQ ID NO: 427 - DNA, 2882 bp, Xenopus laevis
ggagtgcaggcatttgttttgggatttttttttttactgggggtttgcttagggtggaaggccgtatttcgttttcttctgtcctcatcgccatggcgcctgtcaagcaccgcaagatcgtgatgttaggttacccttcagtaggtaaatcttccctcgcacttcagttttttaaaggggattttcctaaggactatgagcctaccattgagaacacttggagcaagacctttgttatggggagcgatgagtttgagttggatgtggttgacactgcagggcaggatgaatactctctgcttcctcagtcattcatctttgggatccatggatacattgttgtttactcagtggcatgctccagaagcttccagattgcccgtgccattcatagcattcttgtggacaagcggggaaagtgtctcatgcctatagtccttgttgggaataagaatgatctgccaactcactgccgtgaagtgaaaccagaagatgggaaaaagcttgcagagtcttggggtgccgcattcctggaagtttcagcaaaggaccctgagaggagcaagctgatctttactaaaatgattgaggaaattgaccgcgttgagcgatcctttgatgaagagaagaaatgctgcgtcatgtgaaattcatcctcccgcaccatctgactagaggagtagcagtagtatatgtgaagcctggcagatgagacagatgatccctctgtccagtgatgttactgcagcagacctatgcaccgatcaatgcaatccttattggcccggcagcggggttacatgatgtttcctttgctgggtccgacaacactttcattttgatgctttcactatgggaactgattgaactgattcatagcattttgttttccatgtttgtgctgtagctatgtcacggatgagcaccgattgcaacagcagttgcatttacagtatcaaccccttttaatagatatattgtgtatcatgcagtttgcacaaacttgcagcaatgctgttgacctgtacatatatattttttgtgtgtaacctgttacagagcctatttatgtttaaaaagaaaaacttgtatttgtcatggggtgggggtaggaaagggaggggataagattatttatatacttagtttcattagttacctctcttgaatgaggaggggttgattttgcagtaatgtgaacttagatttttttctgaacattggatatctgagtataatccctggaaatgctgcagtgtctctgctcctttcaagattagaagggcagatgcatttatgaactgtttacacaagattcctggtctgcctggcaggtccctaaggctatagttagaagactgaatgaaactcctagtgaaatgatgcagttggcaatccctaaaccatgcacagttcttgtttggagattcccctgttggaagtctctattattagccatagggccaacgctcgacattgtgcagggtgagcattataagagcaacaagttgcctcaggagactttggtgtagctaattgcactaaccctaactgggtgtcagccagctgcttttcttttgctttttaagcaaggtcctcaccagagcagacaaactagctgcccacgtggcccctggcctatatgtggaaaagtttacttgctgtttagtgagatactaaatggcttgatctttgactatttatgtgccttttgttattctggccagcagtgtatggtcagaagacaacctttatcggacagaaagaatgtaaatgtgtaagttattattaatatttttctggcacaaaactgattttgacttttttttcttgttttgaattgtttctataatgaatttcagttttgtgtatttatttttttgtgataattgtgatgcttttttctgtttccttttttcttataatcctgaaacttgatttgctgttggtttttcagccatgcctcggattaataaaaaagggaaagttacaaccgagccaaaaatttctgtcagtgtggtaatcggatgctttgcatgaatgggcaaaagggaaattattgttgatgtttctaagtggtgtttactttccttttaattttcatccttccttaagatcaacttgaaaattgttgtagacttattttgaagacatttttgcaatctatttaatgtttgcagctcttcagttccacttaccttaacaaccaggcggtggtttgaatgacactttaaaatgtatagcagagggatacccaaaaagaaatataaatagcatacctttgtcggtcctaacacaaccacagtagtattcttttctgcttctattgacaagcaggagcccctatgctggttgccttgctaaaagtattttccttatgtaacgggttggtacatttacttcttatcacagcatggtggtgataatattgaggtctgttaagaatacctgagctaaagcaagaatgcagcatttccatcacatacatactaaccaacaacagttattaaacaggttaggtaaccgtgtttatttatttttgtcattgaaaccctttcatattttcattctaacgatttccctttagttttagttgaataaacctgtattttgttcatatatgggtatttagcaaatttgggcctggaaaacattaaaccatccatgaaagcaattctgtcagtatataaacatcatgaacagtgtttttttttaggcatggatcatttatatatgaaagtttttattttgatgttgtttagatttcaatttaccattgatggtttgaattgaaccgattcccatgtggcattgcttttgttttgtattgtaatttcttctaataaagattgttaaatacttttaataaaaaaaaaaaaaaa

SEQ ID NO: 428 - DNA, 4261 bp, Xenopus laevis
cagagaagaaccgtctagtggagtaaagtcggaccggtgtccagcagcatctagccaggcaaaatgtctactcctggaacttcagccacaggtgatcctggaaacaggcgcctgcagcagactcaagcgcaagtcgatgaggtggttgatattatgagagttaatgtggacaaagtcctggagagagaccagaagttgtctgaacttgatgaccgggcagatgcactgcaagctggcgcttcccagtttgagaccagtgctgcaaagcttaaaagaaagtactggtggaaaaactgcaagatgtgggcaatattgatagctgtagttctggttataatcatcatcatcattgtgtggagcgtctcctaatcttccgggatacggatcctaactgaagccaaaccagttgctgcagtttctttcttttttttttctttttttttaatctccgaacctgctgtatttgagagtttatattccagctcaaggaaaaaatgttttagtttaatatttcttgttcatagttaagtgccttaaatgaaacctaaaacacagcttatttaataccaaacgaatgggcacaatgagcactttgcactgtgtctttaaacagagttgaatgtgagtgtattaacattttcccgcttaaattcttactgttctctttaattgccctctgcagagaaaaacagattgtgtgcttagcacattgtcaaggactttgcaacttggtggttctgaactaaaactcccagcagccttctgaagcaactggagcctcacaagatgcaaatctgtgaactgtacgagagccaagcaaaaatctaacagtgaaaagtaataaaattatatataatttaaatggagtgccaagaggtaaaacctttctcaggtatttgtagaaacaaagggaaaaaatgtgccctatttttaatagataataaaatctaagaactaacccacagcaaccaataagacgtttgcatttaaacaggtgacctgtacattctacctgctgattggttgctatgtgttactgcacctaggcaaagttaatgctttttattacgtaacaccatttgtcttctaaactttgctctatgattaccttggtggcctttattatgatccccatggggagaacagaattttcctgcatgttttacaaccgaaacatcttgaaaaaaaatatacactagaagttaaagggtgaattgttaatttgtacatcattaacctaattaaattacaagcaattagaggagacaccccatcacacattgtgccttaagtttctgcaggcagtctctgttgtttgctacattctcttagggtgcaaataaaccaatgctcataatctgctttctccttaatattgttgtggctagggctcagtgggcctcattaatgacactggggacatatttactagtgtgataaccccatggcaatcaatttccactgtctattgtggatagaataatgaaaataaatcttttgctgtgggttattgcagggggcaaataccaatgttaatacaaccacccagtgtgtttttattaaactatttagtaactgcattctttcctagcccctgttctataatcttagcaacaaccccactccattttgctttccggtgtttttatggactgtactgctaatccttctgaatgggcaagatttgtagctctcagatacatagccagttaacgctttctttaaaaacatagaaaacaatgttttaaatgtgcaaatgtgcaatgtttgttttaatgtgcagctagttgggagtttgttgtgagctggagctctacaaatctggagaacttatggttgtttattggatgaacttattggatccctgtagtaggaggattttgcagctattgggttggcactgtgcagggtcatatgttcagatagttgaagccttgctgtaacataagcaaatgttagaaaaggggggtttgacctgaaaaactccagaaagccctgatttagtcagcctcgtagtgtatgtaaaattaactgcacatacagggctcatgcgtgcttcagatcctcattaaatttcactgtcccactacaataacactacaaaggttgcataaaataaaattgcagcacattgcatctttggagccattgttcaagtctgaatgcataggtgcataaacccatcacattctcatagagggaaagttgcaacaactaatattgtatgaagctggtttgcgcctaaaatgagtccataacattgtttgcgaaatatgtgtgtttgccccattatttgtccagccaaatattggattctgtaatatggtatctgtatttgataaccgatcattaagcttcttctgcacctggctttgtattttctgttaatatgcaccgcagctttaagtgatgctctgtagagctccatagtctattacatttggattttgcctttggtttaagcaggaatgttcgatgcacagctgtctaggcatactgatctttttgtcccagcttattcatgctgagggacaacttgtactgcatagcaactgtttgagtttggcaccaggctaattatatgttgcacaagaactgtgagttcaagaaaaacatatatatgcatagcgagactggttaatccagttgttacatgtattgcaggaaaagtgccagcctgcctctgtttgcatacagggatatcacataagcagatgctagatgactccttttgcctttgtgaatagcttactgtggtctttccatttgcaccagccattaataccatttgacgttgccaaagttaaggtggccatacatggatagatccgctcgtttgtcgatgttgccaaacgagcgcatctccctccgatatgcccaccttgaggtgggcaatatcgggctgatccgatcgtgggccctagggcccaacgatcggatcctagctttcgcaaacgggcggtcggatcgtgggaccgcatcaatgaacagatgtggccgcgatccgacgggttttttaatcccatctgatcgagatctggaagactttcggcctgatctcgatcgggaaagcccgtcgggggcccccatacacgggccaataagctgccgactcggtctgtctgcagcttttatcagccagtgtatggccacctttagtgttcatttaaatcctttcgtgcagcaactagttgtattttgccagttcatttctaagtagctggaggtttttttgttcgtatggtggaacgatatatatatatttacagccaaaattgcaaccccctgtcgaaaactgtatttcagcttaaaacaagtagcagctacagatctttggttgaacgacacggataagtgtaaagtctccaggatatacaagctcttgcctatctctagattgacaaatacaagtgttctggagccagtgaagctgttggctccttgttgcactgctgtggtccttttctttcttgctatgcacgcaaggttattgggttcattctgtctaggttgagccccaatataaataaaacccagttaactataatattgctttgtcatttaggctatattgccacatgtttttgctctacaagtgaccttctttctaaaagtgccttccgcaaatatccaatgtgcctattgctaatcgtaaataccactgactctgaccgtatcgaatgcttttccagtttctaaatcaaagtgccaaggcttaaccgaatcctatgctttgtaaccaaaacacaagaattataccagtttctaaaatgcagctttgctcgtataaaccattacagatgctggcactgacccaattaacaatagggaaaagcagtgtcaacacattttgatgctggaaaatttaagctgatgctttaattctgcaaaagctggagcaacaaaagtggcccgtctgtggtttagtgtcccttgtaaaagtggcattgaacggtgtctgtggagtggcatttgatgaggcaaatcttggcttcaagtgtcagtatttatttgtgtcgaggacataataaacatttattgacattcatatgtaagtctgactctttgatggttctgtatcatgtgtggtatttgcctacagcatatccttgttacttccatttattatccctaaaactttttctgtctaactgattgttttgtacactgtgcactaacacaaatttactgtacaattgaataaaagtttgtcggtaaaaaaaaaaaaaaaaaaaaaaaaaaaaaaaaaaaaaaaaaaaaa

SEQ ID NO: 429 - DNA, 3223 bp, Xenopus laevis
cccccttcctttctgccaggcagtctcctgacgtcatcatcgtcgtcaccgtgtactgagcgagagagctgagcggcgggcagagtgaaaagcctggactttgttgttattgttgtctctgcaccgcttctccctggccgggaagcgagcgacaagtctgagcggccagtatgtatgttcaaaatgcaacagatcaactgcagcttagttgacacctgaatctgaaaaactgaaaatggataaatgtaaacacgttggccgattgcgtcttgcccaagatcattcgattttgaaccctcagaagtggcactgtgtggattgcaacactacagaatcagtgtgggcttgcctaagctgttcacatgttgcatgtggtcgatacattgaagagcatgcactgcgtcactttcaggacagtaagcatcccttggctttggaggttaatgaactttatgtgttttgttacctctgtgatgattatgttctcaatgacaacaccactggtgaccttaaacttttacgaagcacattaagtgcgatcaaaagtcagaattacgactgtacaacacgtagtggtcggactttgcggtctatggtaagtgcagatgattcattcatttcacatgaaggcgcacaagcctttcttcagaatgaagaccgagcattcactgcattgtggcatcggaggcatgctctcttagggaaggtttttagatcatggtttgctttgactccaaaaggcaagcagaggttagaagaggaacgcttgagggaagaggccgagcacaagagggaggaagcaagaaaaaggcggcagcaattgaagcacaaattaaaagaagaaatggaaagcactccccccagaaagagttcacgtttgcaacagcaaatacagccttcacccaaaattgaatcgtcctctgtgcaaaaaatgaaccaaaaaaacgctccttccacaaaacaaaatccaccagcacctacctctgataaagcacgcttaaagaaaattggtaattctccaataaaaagaaagcccactgtgacccctggagtaacaggactgaggaatctggggaacacttgctatatgaactcaatacttcaaatactgagtcatttgcatgtttttcgggagtgttttttacaacttgatctcaatcaaactcaggagttgttggcagctgatggcagtggaaaaacaaggctgtccagcaaatacccacctggtgctgagctaccaagagtaacacaaaagcacactaaaggtcaaagatcactggcaaggcggccaagcttctccttgggacttagtggtggggcctcaaatagtagaaacatggaacttattcagcctaaggagccaagttcgaagcacatatccctatgccatgaattgcataccctcttccaagtcatgtggtcagggaaatgggcactggtttctccttttgcaatgctgcattcagtgtggaggcttataccagctttccatgggtatgcacagcaagatgctcaggaatttctctgtgaactattagataaagtgcaacaagaattggagacaactggcaccagatacccagccctaattcctacatctcaaagaaaactcatcagacaggtcctgaatgtcgtcaacaacatttttcatgggcaactgcttagtcaggttacatgtctcgtctgtgatcacaagtcaaataccatcgagccattttgggacttgtctcttgaatttcccgagaggtaccacttcagtggcaaagcgacggcttcccaacggccttgtttgttgacagaaatgctggctaaattcacagagactgaagccttagaagggaagatctacgcatgcgatcagtgcaacaaagcacagaagcagctgatggtgtgtcgcttacctcaggtcctgagactccacctcaagagattcaggtggtctggccgtaaccatagagaaaaaatcggagtgcatgttcgattcgaccagatgctgaacatggagccttattgttgtagagagtccactgcagccctgagagctgactgctttatttatgatctgtcttctgtggtgatgcatcatgggaaaggctttggttctggccattacactgccttttgttacaatccggaaggaggcttctgggtacactgcaatgactccaagctacattcatgtgccgtggaagaggtgtgcaaggcacaagcatacatcttattttatacccagcgagttactcaggagaatggacatttgtcagaaagacttcctctccatgacagtccgcaatccccacccccttgagacgctctttaacggcaggaagatccctgaccttttggcagcttctacgtctctctattccataagagtatttgtgtgtgtgtgtatatacactgggtcaggcacacgaagtctcctctgcattgtgcctgactctgcaaatgaaatgacacaatcagaattagcagacttggcatagtattaacaagacttaaaggggttgttcatccttgaattaacatttggcgtgatgtggagagtgatattcggagacggtttgcgatcggttttcattttttattgtttgtggtttttgagttaatcggccttttgcacaacagctctccagtttgcaatttctggttgctagagtccaaattaccctagcaaccagcggtgtaactagatattactgggccccacagcagattatttttcaggcccccaggtttaccaatatttatttaaattgtatatgaattaggacctcatggtacctcctgagccccccctgcagccgcagggtctgcttcctctatagttacgctccctgctagcaaccatgcactggtttaaataagagactggaatatgaatacgaggcctgaatagaaagatgagtaaaaaaaagtacttatacattttgtagccttgcaaagcattttcttttagatggggtcagttaatcccatttgggggctgggaggagtcagaagaaaagggcaaataattcaaaaatcataaaaaatgaataacggagaccaattgaaaattgcttcgaattgcccattccatactaaaagttaaccacccctttacgtaagaaagtgtgactttgtcttattcatgtactatatgtttatacagttttgtattgaattaagcactcaaactagaataaaatggttttaacattttgtaaaaaaaaaaaaaaaa

SEQ ID NO: 430 - DNA, 1300 bp, Xenopus laevis
cggaagtgcaaaaacgcaattccggacatggcgagccctgggttggaactgcttttctccctgttttcctcggagatttctcgccctacggattcgctgatatgtttcatccattgggagttgatttgccgcggcctgcggtgtttgggacgaggggaggaggcaggagctcaggagaccggatcagagcgcctcccggttggatgggcagagaataaggacctgtacacactgtgttatgggagcccaaattcacagattctgcttaaagccttgacagtagagggcactgtaattgtgaatatcatggatatgcacacagagaaggttgcagatgtgaccctgcaagtgtctcagttcattgactctggccacctgcaggaatacgacagggtttataagaatgctgtggagctgaagggcctcctagataaggagctgatcttgcctgtgtttggcactctgaaggaacctggcaccaatacctggccagcgagggagcaagaaccacagcatgatcccctacgtgtcccacccaggcacctaccatcccggctccctgcctggactgacccacatgggcatcccccatacggagctgcagacctggatcctttgggggggcattctggaggcatggtctttgatccattccggggccaatgcacacagccaagaattgatcccttacatggcctcccacctggagcagtgccacctggtgcccgatttgacccatttggtccgataggttcaggtcgcccaaggccagaccctgaccatctcccgccccctggatatgatgatatgttcttgtgataaccagctgtgcctccttagtgagcctctaccatgagatttttgcactgttaccttttttggccaaaactgtgatagcagtgtcccctgtctttctagctttgcaccttttcccttatactgccccagaactgtctgtgatattgcagtgccctcttctgtctttccagagcactgcaccttttccattgcactgccctggaaatctatgtgtgagatagcagcacccgctgtgtctttccagagcattgcagcttatcccttgcacttaataattgtagtgtattgtacctcttgccctgcagcctcaacacagagctcagaaaagatagttccgttcccttgcactgactgtgagtgcaaggagcagcctcttgtacagaaactcccaaactctatttgtgttcttctcctttattataaataaatacagtgagacacaaaaaaaaaaaaaaaaaaaaaaaaaaaaaaaaaaaaaaaa

SEQ ID NO: 431 - DNA, 2675 bp, Xenopus laevis
gaaaacttgggcagccatcttgcggaacacaagcaagcaggaagagctgatagaagatttgaacacagtttcaatttaagtatcatttatttttaggcataggggacgtgaaggaagggcatttaagaactttctgagccgcagttttcctacccagcctttctttggtaaaatttccatctttaactccccccggtcctgggttgggtggctgtccccacgggatttgcttcgccacggcaggagagcggggcgcccggcggggcgggggggacagcgtgacatccaacagcgttggttttagttttaggcgccgcattcgagggaagaggagaaacgacagatcgttgcggaatagtaccgacagaagcatggaggcggagagaggggaacagaataaagaaggtgaagtgaatgttttggatgatattttaactgaagcaccagatcaagatgatgaattatacaaccctgaaagtgaacaagatgtaaatgaaaaaaaaggttccaaaagaaaaagtggcagaattgatatgactgaaaataagagacaaaagccatcttcacatatgagcagacaacctcctcaaagagtagcatctggggctaacaagaaggttatcagcaccaaagggaaaccagttacagaatacaagtgtgatgactttcacaggcaagaccggaacagaaagtctgatggggatagaaggatccgatcttctagcggcactgtaagagacaattataaagtgccacaagataaaatcagtcttagaaagagagagtctgacagatctgataggcgacctaaatcaagtacacctgatatagcttctgagaaaataagacctgatacaagcagacgccagagcagatccagccattcttcaaatgaaggcaattctgatgattatgggtctgatagggaaactggcagcagtgaatcatcagatgaagaacaaggcaataacagtgagaatgatgaagaagggatggaggaggaggaagaagatgatgagggtgaggaagctgaagaaggggaggaagagtatgatcgtgatgaacatgctcgagaccagagagatggaaatgattatgatactcgtagcgaggcaagcgactctgaatcagattctgcctctttcactgatggggattctgttagatctggttcaggatctgacatttcagatcaaaaaaagaaggaaaggaaaagggctagaggtatatctccaattgtgtttgatagaagtggaagttctgcatcagactcttatgcaggttcagaaaagaagcacgaaaaattgccctcttctgttcgtgatgttcgaaaagaacgcaccaacaaaattagatatatactgcaagaagccagattctttcttatcaagagtaacaaccacgagaatgtttctttggccaaggcaaagggtgtttggtcaactttaccagttaacgaaaagaagttaaatgcagctttccgatctgcaaggagtgttattctggtgttttcagttcgagagagtggaaaatttcaaggattcgctaggctgtcctctgagtcacatcatggcgggtcacctattcattgggtgctgcctgccggaatgaatgcaaagatgcttgggggagtctttaaaatagattggatttgcaggagagaactatcattcaccaaatgtgttcatctaaccaacccctggaatgaacataaacctgtaaagattggacgtgatggtcaggaaatcgaacctgattgtggaacccagctctgccttctattctcagcggatgattccattgacttgtatcaagtcattcataaaatgaggcataagagacgaatgaattcacaacccagatcgcgaggaagaccatctcgccgtgaggcaacacgagaagtgggaaggcgtcaaccagaagagtatgatattcataacagaaagaaaccaaggattgactatcctcctgagttccaccagcgcccaggttttgtcaaggatccacgttatcaagaagttgacagaagattcactggtgttcggagagatgtttttttaaatgggtcttacaacgattatgtaagggaatttcataatatgggcccacctccaccatggcagggaatgcaaccgtatccagctattgagcaggctcctcatcatccttactatcagcatcatgcaccgccacctcaagcacatccacagttctcaggtcatcatcctgttcaacatgatgcaagatatcgggataaacgggttcatgactatgatatgagagtggatgattttcttcgacgaacgcaagctgtggtgagtggaagaagaagccgacccagagagcgtgaaagagagcgagaaagggaacgtcccagagacaaccgacgggacagaggccgtgatcgtgatagagatcgtgacagagacaggatgcgcgatagggacagaggggacagaggagataggggcagatacaggagataaatttcctggccagcactggttatgtcctttatgaactttagcttgatattatctccttatgcgtttacaaaatagtgacatttctgttcaatctgtcgaaagcttagagaatactgctccttttatatcatttgatcctctgttgtgcatgtgcgtataaactggagaaatattaaaaaaaaaaaaaaa

SEQ ID NO: 432 - DNA, 3595 bp, Xenopus laevis
gaggattcttgggagtgggcgtatctattgaagagcgctgagagtgggcgtgtctgtttttggcggtgggagcgcgcatgctcagtaccattggctgagagtggagagctgaggcgaccggagcggcggggaggagtatcgggacttttcactgatggaggggcctgtggacaaagaggctccggccctcacacaaccgcctgccccgctctcctctcctagtgccgagaatgaggcggagagccggcagggcccggaggagaggagcggagagagggccgcgctcaattcactggagacgtgtggtttgtgtcggactcacatccagagccgcagcccccgacttctcccctgtctccactccctgtgtcagcgctgccttcccccgcccgagagattcctgagtgtctccgacccgcggccccccgacccctcggccgcccccctgcaagttggggttattcgctgtcccgtgtgcagtcaggagtgcgccgaaagggacatcattgagaacttttttgtccgggacaccaccgaggttcccagtagtaccgttgagaaaccaagtcagcaagtgtgcacaagctgtgaggacaacgcggaggctctgggcttttgtgtggagtgtgtggagtggttgtgcaagaattgtgtgcaggcccatcagagagtgaagttcaccaaagaccacactgtgcgacagaaggaagaagtcccgcctgcagttggagccaatagccagcggccggtcttctgccctttccacaagaaggagcaactgaagctttactgcgagacctgcgacaaactcacgtgcagagactgtcagctccaggaacacaaagaacacaggtatcagtttatagaagaagcatttcagagccagaaagtcatcatggacacgttgattgcaaaattaacggagaagaacaaatacattaaatttaccggagaccaaatccaaaaccgaatccttgaagttaatcagaaccagaagcaggtggaacaggatattaaagtcgccgtcttcacgctaatggttgagatcaacaaaaaaggcaaagccttactgcatcaacttgaggctttggcgaaggatcggcgcatgaagctcctgaaacagcagcatgaagtagacggtctgtccaagcagctggagcacggggtttatttctccaaatgggccgttaacagcaacaacagcactgctttactgtacagcaagcgcttgatcactcatcgcttaaggcacttgctgcgagccaggtgtgatgtcacccccgtaaccaacactgttcagtttcactgtgatgccaattcgtgggctcagaatatatttaacctaggttctctggggattgaagagggcgacccctctcagcaaacgactcctatggaagttcagaatactcagggaacccaaccaggcaaccagctgtccaaattccccatgggcttggctaactttttttgatcgaaggatattccttcgatcgttggattaaaatcagtctcccattttccctgacagtttttatatctctctgtagagcttgagctgtatatatttatcttccagtggatcatgagaatcaagtgacgttcccttgtcaagttcattcaaggagagggtcctaatttctaatcaaagggctggccacaagtatggaggacaggacagctaaaaacagcaaatacaggtacaggtatgggatctattgtgcagagtgtttgggacttggggtttttgaataatggatctttccgtggtttggatctaaacaccttaagtctacccaggggctccttcaatgccaccccccagcactttcctttcctgtcctttatcacctcgcctgattggagctgcgcccctgagtctactagaaaatagcgatgcaccgaatccactatttaggatttggccgaatcctttgtgaaagattcggccaaataccgaaccgaatcctcatttccatatgcaaattaggggtgggaaaggaaaaaaaaaatttacttccctgttttgtgacgaaaagtcatgtgtgtgtttcccttcccggccctaatttgcatatgccaattaggattcggatttggttcagccaggccgaatccgaatcctgctcaaaaaggtaaaaatcccgaaccggatcctggatccttactagagggtcatgtggacatggagcagacccaatgggccggtgttgcttccagtgaggattcattctgtcttggttgggatcgagtgcaggcgactgttttattgttgcacagaaaaaggaaatcatttttaaatatttggataaagtggattctatgggagatggcctttccataattcagatatttttaaataaaaggttcctggataacagatcccatacccgttatctggaaaccgtttatccagaaagctgcgaatttcagaaggccacctcccatagactccattttaattaattaacatttttggcaattatttcctttttctctatgataatggatcagaatcttgtagttgatcccagctatgatggagtgaatccttactggaaacaaaacaatcctgttatgcttatttcaagttttttttttagtagacttggtgtgtggggatcccaattgtggagagatccccctatccggagaaccccgggtcccgagcattctggatggcgggtcccatacctgtatattgctacagtttgaacaggtaatatcaacagattatgaattttaagtgccaaagatattgtctattatgtatattacgccctttgtttacagtttgcaatggagaaatcctgagggtgaccattagcaaaataagcacaaatatgattttcccattaatgccaaggtgctggttttattgctagactactagtaattatccctgtagatggctaaagctggggggcagatttcggacatttttcaatgtcaatttttttgcaacctgtggaaaaattcccaaaactgtgccagtatttgcaggtgtccccagcacttgtcagctaatagtgtcctgcaggtacaggacacttacctgtgcttacctgcagcacacacctatatacaaggaagactctcaatataaacttctaagcctcatccctttacccttcaatctacgaggttttgcagaatccatgacaacagaactgtagatgttgttatgcggcgtctattaatcactactgaattatacgatagagaaggaatgttttatataaagttgcacagctgcttctcatcagtgcttacaaatgtgtaaaaacagtgggactttgggattcaagatgtttgtatctcggtgtttatacttatacttatacttatacttgctagagatattgtgcaagtccgagtggctgagatatatattgtgcaccattccagcttttgtttcgctgcaactcatgggcaaattatggagggatttatataaatgccatgccccagttaaaggggatctgcaaggcacttattatttttaatagacaaatgcttatatgtaattaaatgttaattaaaatacagttattgtaaactgtcaaaaaaaaaaaaaaaaaaaaaaaaaaaaaaa

SEQ ID NO: 433 - DNA, 1922 bp, Xenopus laevis
gaccagacttagtatcggggggagcggagcggccgggtatcagagaagattcagcacgtcggacagcggcgcaatgagatgatcaggaccgggatggctcctctccccgcggggctccacctgctgctgctgctgcttatggggctgctgagaggatgcctgggtaccgacacagaggaacgtcttgttgaacatctattgggcccctctcgctacaacaaacttatccgacccgcaacaaatggctcagagcaagtcaccgtccaacttatggtctccttggcccaactaatcagcgtgcatgagcgggagcagattatgacaaccaatgtatggctgactcaggaatgggaggattacaggctcacctgggacccagcggagtttgacaacatgaagaaagtccgacttccatccaaacatatttggcttccggatgttgtgctgtacaacaatgctgacgggatgtacgaggtgtccttctactccaacgctgtggtgtcccatgatggcagcatattttggttgccccctgccatatacaagagcgcctgcaaaattgaagtcaagcacttccccttcgaccagcagaactgtaccatgaagttccgctcttggacgtacgaccgcacagagctggacctggtgctgaggagcgacgtggccagcctcgatgacttcacgcccagcggagagtgggacataatcgctctgcccgggaggaggaacgagaatcccaatgactccacctacgtggacatcacctacgacttcatcatacggcgcaagcccctcttctacaccatcaaccttataatcccctgcatcctcattacctctctggccatcctagtcttctatttgccctcagactgtggggagaaaatgactctgtgcatatcggtgctactggccctcacagtgttcctacttcttatatccaagatcgtaccccccacctctttagacgtgccactggtggggaagtatctgatgttcactatggtcctggtgacattttccatcgtgactagtgtctgcgtattaaatgtgcaccaccgctccccgaccacacacaccatgcctccctgggttaaggtggtcttcctggataaactgcccactttactctttatgaagcagcccaggcagaactgtgcccgccagcggttgcgccagcagaggcaaagccaggagagggccgcgggtaatttcttcctccgggacaacgccaggtcctgcacctgctacattaaccaggcttcggttaaaaagtacggcgcccagctgtcggagcttccagaagaagtcaatggcttccgggacaggcagggcaaggtgcgccagtgtctgtgcggcctgcaggaggcagtggacggagttcgtttcatcgctgatcacatgaagagcgaagacgatgatcagagtgtgagtgaagactggaaatacgttgccatggttatcgaccgcctcttcctgtggatctttgtgttcgtctgtgtttttgggacaatcggcatgtttctgcagccgctgtttcagaactacacgaccaatacgtttctacagatcaaccacgcggcacccaactgagaaacgctggggccctggtcactcgtcaaacgcccaaatctactttagagacccccccccccaaacacagaaaaagaaatcctggtggaattccagcccctgggaaaaccttgccccccccccttcaccactcagtgattagttcaaatctggggaacatactcctccgctcacatgtttgtatatcgacccggcaagttccagatccaggtgtgaggggtccgtgtgaattgaaccccacccccagactctcatgttaaccacaagcaataaagatgagctgctggatccgcaaaaaaaaaaaaaaaaaaaaaaaaaaaaaaaaaaaa

SEQ ID NO: 434 - DNA, 1018 bp, Xenopus laevis
cgggattcccaattgtactgcggcgcattccggagttcgtgctgctggcgctccgctcaggcgccttccaggagggatttagagccagcgctagggcaactcggccgggttcacgcccctcacctgcgagccagatccccggacccgccagcagagatcccagtactgggttgttccattgtgttcacataggtgaatccgcgcagcagcgttaactaagaaaaatggggaaacagaacagcaaacttgctcctgaagtaatggaggatcttgtgaagagcacagagtttaatgagcacgagcttaaacagtggtacaaagggttcttgaaggactgtccaagtggccggctgaacctggacgaattccagcagctctatgtaaagtttttcccatatggagatgcatcaaagtttgcccagcacgctttcagaacctttgataaaaacggcgacgggacgatcgatttcagagagttcatctgtgctctttccatcacctcaaggggaagctttgaacaaaaacttaactgggcattcaacatgtacgatcttgacggcgacggtaaaattacaagagtggaaatgttggaaatcatagaggctatttataaaatggtgggcacggtgatcatgatgaaaatgaatgaagacggcctgacacccgagcaaagggtagacaagatcttcagcaagatggataagaacaatgacgaccagatcacactggacgaattcaaagaagcggcaaagagcgacccttccattgtattactgctgcagtgtgacattcagaaatgagccgcatacggactgcacacaagtttcaatgttccattcagtttgcagctatttccacgacgataaaaaaaaaccgacaaaacccgaaaaataacaaaacaacaaaaaaaaatttattgcttggactacctataaatggacttgcttcttgtgtttgaaacactcttgtgcatgagaatgtcatttgctaaggaattttaaaaagtatataacatata

SEQ ID NO: 435 - DNA, 1741 bp, Xenopus laevis
cgcactctcctataagaagtctgctgtgccagtaacccctcatatctgcagaatgcagaatccaagaaaggaaatgatttctcagctccacaacctttgtgctctgggtgatacgactaagctgcacgctcttctcagccattcagcctcaatcattaacgaaacaagtgaacatggatggagcgctcttatgtttggtgctcgaaacggacactttgatgttgtaaatatgctgctggagaaagggtgtgacagaacactggttaataagtcaaaccagactgctttggatatagccaagttttggggtcacaaacacattgctgacttactgacttatacaaaaggaggatcaaaaccccactttttattaaatgctatagaagaatacgataattttttttgtagtacaattctggacaaaaggagtgataagaggacagatattaattggctaaagtccaaacaaactcaggccagcactgtttatatcctgttttccaacctaaatccattagttcatttagttgggggcagagatactccagaagaaccagaaatcaagctttgcaggctgcagtcggaggaagtgaaggaatacctgttcaagcctgaaggtgtcactgtgatatttcttggtgttgaaaaacagtcgaaatctgttaattcctcagaacccaaaaaagattttggtggggaggatgatggactgatcacatggtttgggcttaatgcagacaatgtatctactgaacagtttgaaaagaaacatgaagggtgctattttctacagcccccaatgcctgcgtttatgcagctgagccctaaagaagcaggtatattagcccaagcaagatctgttctggcatggcacagccggtacaagttctgcccaacatgcggcagtgcaacaatcattgaagaaggtggatacaaaagaacatgcttaaagaatgaatgtcctagtctgcgagggatccacaatacatcatatccaagagttgatcctgtggtgataatgttagttattcatcctgatggaaaccattgtctgctgggaagacagaagagatttcctgtgggcatgttctcttgtttagcaggatttattgaacctggagaaattattgaagatgcagttcgaagagaggttgaagaggagagcggggtaaaagttggtcatgttcagtatgtatcatgtcagccatggcctatgccttcatccctaatgattggctgcttggcagttgcaatatctactgaaattaaagttgacaaagtggaaatagaagatgcccgttggttcactagagaacaggttgtagatgcggtgattaaaggaaaccatcaggcattaactgtaccgccaaggcaagccattgcctatcagttaataaagcattggattggaatgaatgccaatctctaaatcttcaaatctgtgggatctaaatatacattttacatgtttatttaaagaactgagaaatgcagtttccatagggatgtatcatcgttgcacctacaggatgacataaacagtataatcaatgcaataaatcccagctgccgtcaagatttaagcagaatgaaaatgtatccagaaacccggtatccagaatgctctgaatcatgggaaagccaattccaatatattttaagcaattaattctaattttggaaaagtatttcttttttcctctttaacaataaaccagtaccttgtaaaaaaaaaaaaaaa

SEQ ID NO: 436 - DNA, 1502 bp, Xenopus laevis
gcccggaaatgctcgtcggtccccgtctctgttccgcccgcagtcatggctgttccgaagaagagcacgaaggaaaggctggagtcgttgctggacgatttggaagtactgtccagagaagttattgaaacacttgcactttcaaggagccagaagctcagccaacctggagaagagaaccaaattttagagttacttattcagaaggatggggaattccaagaactgatgaaagtggcattcagccagggaaagactcaccaagaaatgcaagttttagaaaaagaggtggagaagagagacagtgatatccagcaactacagaaacagctgaaagaagctgaacatatattggcaacggctgtctatcaagctaaggaaaaattgaaatcaatagataaagcaaggaaaggtgtaatttcttcagaggaacttattaagtatgcccatcgaattagtgcaagcaatgctgtatgtgctcctttgacttgggtgccaggtgatccccgaaggccttatcccaccgatttggaaatgaggagtggcctactgggtcagatgagtaacctgcctactaatggagtcaatggacatttacctggagatgcactggctgctgggcgactcccagatgttttggctcctcaatacccatggcaatcgagtgacatgtccatgaacatgctacctccaaatcacagtaatgaatttttaatggaatcccttgggcccaacaaggagaatgaagaagatgttgaggtcatgtccacagattcatctagcagcagcagtgactctgattaaatgtaggcagaaagtttacagcaactggaatccaaccactagcactgagatgtgtgcatgttgcctaagtggcttaaagaactgaagactgccacaataatggaagccatggactttttttgtcaagtacttggaatcttgaactgacgatttgtactgatcatttttgtgatttgttatatacatatatatttttgatacaaatgtgtttatttgtttgaaggaagcagtgttatcctgtcctatttcattatttgtgaaacccttgaagtgcctgaaagggaggccagcatgtgttttagcacagtgctgtatatcgaatgtgctagcattctgctttatttgctttatccatttctatcaaaacttcattgtgaaatgctcattattgggtcagttagaaatataaaactattgtatatattttcattgggttaacttttcttaatgtgtttgttgtaaatagtattttgctaggtctatcactgtgtataatgcatattcattgttgtgtgcatatgtattgaagggattgacattttctaaaaatgtgtatatcgccatatgtacataggggtatatttgtatatataatatcatgtatcatgcttgttaaacattctgagggctgttttacctccatattccctatcccattaaactgatagacttttgtaaaaaaaaaaaaaaaaaaaaaa

SEQ ID NO: 437 - DNA, 1959 bp, Xenopus laevis
cagccctgcagacgctcgaaatagagaagcgcgagttctggagcccgagaaggggatgagagggcacgggagacactacggctgttatccggacatatccccgcgatgaggcacaccccagtccagcgccacctgccgcctttctccccccactgcctggcaagaggcaagaatgagaaactgttttatacaggaggggatgagatttgggatgaagaggaggaggaggaggaggaggaaggcctcaggagagcatgcaccccccctcccaggcagcagcgcaggggtcggaggcagaggttacgcaacctgcgctatctatactggggtctgtacaagcgctccgccatgttgcctttgcagtggaaactgtggggaggcctcggcgggaggaggagaagattatggaggaaagtgcgggaaggtggcggctgttccgtgggggtggagctggacaaatcacatggccggggagctgaagaagttgcttcagtggccaatcacgttgcagacggagagacagattccccccacggactgccaaatggattctcagagtccgaccccatcctcatcacaaatgtgtgcagcatcgggaaccaggagactccggccatcaatgggccccatccccaggaagaactgaccccacccccagagaaggaggctccacccattgtcaccctgactcaggagcacgtgacctgtgtgcaaagtatcctggaccagttcctgcagacgtatggcagcctcatacccctcgggacagaagaggttttggagaagctggaggacgtgttccaggagccctttactacccccgccaggaggactgtggtgcaacatgtgatccagtcgtaccagcggcatcctggaaacgcaatgttacggggattccgtgtaacctacaagcgccatgtgttaagtatggacgacctgggcactctctatggccagaactggctcaatgaccaggtaatgaacatgtatggagatttagttatggatgccgtgccagacaaggttcatttcttcaacagtttcttttacgataaactgcgaacgaaaggctatgaaggggttaagaggtggacgaaaaacgtggatatctttaacaaacagttgctccttatccccatacatctcgaggtccactggtctcttgtctgtgttgatgtaccgaaccggaccatcacttactttgattcccaacgcactctcaacagacgctgtccaaagcacatagccaaatacctccaggctgaggcagttaagaaggaccggcctgaatacgtcagcggctggacaggattgttcaagatgaatgttgcgagacagaacaatgatagcgactgtggggcattcgtattgcagtactgtaagttcctcgccctcggactcccgtttacgttcgggcagcaggacatgcccaagctgcggcggcagatctacaaggagctgtgccactgcaagctggcggtgtgaggccacgtgtcttctgacgtgggacatttacattattgtaggggactctgctgagcctttgtacttgctgcgccgagcctcgtctttgtccccttactggaggaccgtactacctgtttacccccgtgggtgcctcgcccacctgtacattgaaggattctgtggatcaattccaggggggtctctgccccgccgccctttttgctggtggatcgtctttcctcgtccttcgtgtccctcacacaatattcccccccccccaaacacttaattctttgcataaattttttttttacactgttcatttcttatttaaatgttttctgggacaaatttgtagttttttcttggtcaaaaaataaaatgtaaaaaaccagctgaataaaaagttgtctagtaaaaaaaaaaaaaaaaaaaaaaaaaaaaaaaaaaaaaaaaaaaaaaaaaaaaaaaaaaaaaaaaaaaaaaaaaaaa

SEQ ID NO: 438 - DNA, 2079 bp, Xenopus laevis
gggacggacatcagctatgagagggattcttccggcggagccagcagggaaagccgatttactcatgtagtcaacagcaaagctgccacattgatcgttccagccggaaccgttgccaacactgccggttgcagaaatgcatagcactgggcatgtcacgggaagccgtgaaatttgggcgcatgtctaagaagcagcgggatcttttgcaagctgaggtgaagatacagctgatgaaagagcaacaaatgcagcttccctctattcccttcagtgctgatacccaaggagacaaaactgctcttccctcatcttctgagcggccaccatcctttgtatctgtctcatggactgggcacagcaaatgggacacctcctgttcagctcggccatgcccagtgcccaaaactcatccttcagtccagaatcaccacccagagaagcttccgacagagatggggagccggaagtcctattttagggaccaccagacttacctagagcactcgaggctaaacatcattcaaagacttcctccctctatccagagtccagaatgttatgggagcccaaacttttccagctgtcttctttcagaccgtttgatttctactgtagagttagacctcctcatgcagaatgttgtatgtgcccaccgagagacgtgtaagtttcaccaggagaatctacaagtgatgaggtgggaagcatttagcccagctgaaatacaaagtttccaacagaagacaatggacgagatgtgggaacgctgtgtgtgtcacatcaccgatgccatccagtatattgtagagtttgccaaacgtcttaatggcttcatggaactgaatcccaatgaccagatcgttcttctaaaagctggggctatggagctgctccttattagaatgagtcgtgctttcaactgctacaacagcaccatatattttgaaggcaaatatgctcctctggatcttttccaatcactaggctgcaatgacctcattagtgccatgtttgacctgtgccattctttgtgtgatctgaatctaactgaacatgaaatggccttcttcagctccatggttctcctggatccaagccagccctggctacaagagaaagagaaggtagaaaatctccacgtgaagctagaactgtccttcagacaattgctgaggaggactcatcgagaatctattctttgcaagcttccacaaaaagggagactgctcagcatctgtcagctgcatatggagaagctgaatattttccggcacatgtatcccggcatcgcatgggagagattcccccctctttacaaagagttgtttgtttccgagacagagaacccttgaaacacaatggagacctggattgctctctttgctcctttagaaaatgagtcatttcgctctccaccatttttttagggaattctgttttgttaatgttaaagaggaacaaagaaaccaggatttcttctatattgaaccttcatgcttgatatcatatgaaagtgcacaagtgaatataaacaaactgaaccaatcacatgtataatattctcgcttaagcggtccttttcttgttgctgtagaactatagtcagggacagcagaataagcaaactgcattccaactggtgcttttacttttataacctgcattctttggcatttggccttgcataactatagggctgctttactacccaccatcccttcatctttatgcctcttaggttataacctcactttaattgcaggttcttctgcttcaactctactttcctcctaagggtctgcggtgtgggccttctcttccaagccttggcaaagaataacctggatagtaagcgttgactgtaacttagatattttaggtttttgtttgtggcattgtacatgtaatattaatcgtggatgtacttaacccactgttaataagctatattgtttttctgtcttccttaatttctataataaaccccatgatgaccatgaaaaaaaaaaaaaaaaaaaaaaaaaaaaaaaaaaaaaaaaaaaaaaaaaaaaaaaaaaaaaaaaaaaaaaaaaaaaa

SEQ ID NO: 439 - DNA, 3168 bp, Xenopus laevis
catggcgcttcagggtggcggaggattagggtccggaggctcgaggctgatagtgttcgggttactgcttgtggccttgcccgtatcgtgggctcggttccaccagctcaagctaaaggatgacatcaggcagaaagtgctcctcaacacgtttggctttttcaaggacggttatatgagcgtgaccattaacagtttctctctgaaagacaataaagacttttccggctcggacagttctacttatggctttagcctggacagaacgaggaatgacggattcttcacatatttggaccaagaacttcattcttgtatcctgaagaaccccccaacagatgtttccattatgctcctcaagatggattttgtggggaaacgtgtttatgtcagcagcgccaaacatgacatgccacttgtctctatctcggagaagactgaagagccacccaaaaacatcacaaaagctgatcaacctgaaccgcttcctgaaaagatgagccgcagagatacagaagttgcagaaaatgctaacaaaaagaaagaagatgctttggaaaaaaaagacaaagaaggcacagctgagtctgccacaaagcttgaaaaagatgccaatcaaaagaaagcagtggaaaagaaagagaaagagcaaaagggtcctattgagtataatgccaccatgcacgtcgaaaagggagttgcctcgtttcagttttccttcaacatcagttcagaggagctggagggcctttacagtttgtatttccatagctgcgccggaaacggcatttctgtgaagcaacatgcctttagcctggatatcaaaattatagagaagaacacggaaagctacttgtccgcagacgaaatcccactaccgaaactctacatctcaatggctctcttcttctttgtggctggcctggtttgggttcacatcctccggaagcgcaggaatgaagtgttcaagatccactggctgatggcggcactgcccatcacaaagtcgttgtcactggtattccatgctattgactaccactacatttcatcccagggattcccaattgaaggctgggcggtggtttattacataatgcacttgttaaaaggagccttgcttttcatcaccatcgctctaattggtacaggctgggcctttgtgaaacacatactctctgacaaggataaaaaaatctttatgatcgtcattcccctacaggtgctcgccaacgtggcatatatcatcattgaatccacagaggaaggcacaacagaatacgggctatggaaagatatcctgttcctggtggacttcctgtgctgcggagccatcctcttcccagttttatggtccatcaggcatctacaggaggcttctgccacagatggaaaagccgcaatcaacttggcgaagctcaagctcttcaaacattactatgtcatgattgtttgcttcatttacttcacccgaatcatcgccatgttcatcaggtttgccattcccttcaagtggaagtggatgtaccagctcttggacgaagttgccacatttatattcttcgtattgaccggctataagttccgccctgcgtccgacaacccgtatctgcagcttcctcaggatgatgatgaggacgacctggaaatggaagcagtagtgacgaccacaggcgcaacagaaagcgtcaagaaagttaaaaagatggtcaacggctcctcagagtcccggtcagagcgggagagcacagcatgaggacagaccaacccgaaatggcttttaatttattttctacctaatgcaaaaacaacgacaaaaaaagtgggtcagactggtacactttccctttcttttcctatgacaagaccattattctcacggcttaatccccccgaaatcaatcaaatgcaccaccattttttagttttgcctctctgccatatgcattaggacatggtagccctgaatatactcctggacatttagtgctccccccggtgcctgagcgtggtgcatatggggaggaaacactttagcgcaaagaggaaccatgaatggatttcataaatgtgccagaaattccatattttataggaactaataagctgtgtagcaggaggatactactgtctgagtgactggtattggcgctggagaattacccccttttattctggttccacctcctggaagtcacatttatatgtaaatattccttctggttttatagggagagagacactcgcacacatatatacgtgtaatgaagggtcggaaaaaatatgtaatagaagaaattactgaaagtgccgaaggccccactcacctatccattctggacataccagagttattgtttctgatggacggacgtatgttggaaaaggacagatttctagtgtttgcagagtttctttcagtcctaccagcccactttttccagtagtagaaccctgaacatgtatggcttccctcataaacaatatggtaccctgggatatagtcaactgtgaccttatattttcttatgcaccagttggtcagactgagtctatatttcagtccttacctgctgatgctggggccctccttcactaaactatccaagctcttttgatttctagattgctgtgtgtttgctaataatagggaagactttgagtaggaatatgttttattttgttttttaaattttttgcccaccttataggggaggggctggagggacagaccatttctatcttaattagaatgaaaggcaacgtgcatcaaacagacaagccattgcgccttgcagaggttcatgggagtgttcgtgggtttggccaaaaattcttggatcatgttcttttcaatacaaaatgttatctaccctggggttgatcatcctcgtgactgtcatatgtttaaatccttcatcggcatgttggggaggaacagtgagacatggcgtgtgtagtggggccctttggggacagtagagcaagtcagtcacttttaacacttccctgttgtccaatatgcaacgactcaggaaacggttcattactgtagaaggccgagacctagagccactgagcaggatacagttactttttaggttgcaagtctatactttttttgtgaataaaaaattgtatttgctttaaaaaaaaaaaaaaaaaaaa

SEQ ID NO: 440 - DNA, 1000 bp, Xenopus laevis
gggcagtaagaatggccagccagtcccagggcatccagcaacttctccaagcagagaaacgggcaaaggacaagctagaggaagccaagaaacgaaaaaacaagcgcttgaggcaagcgaaggaagaagcaacggcagatattgaccagtacaggttaaagagagaggcagacttccggcgcattcagacgtctgtcatggggtcccagggtaacctggcagtgaagatagaggagcaaactgtcgagaagattcagttctacagctccagttacaataaatacaaggagggggtgttaaaggaactgttggatttagcatataatataaaaccagaactccacaccaattacaaatacaagatataataaagcagatgtgcctaagcggaagatggctgataatgtaagctttcgttgaacaaagattggatattttccttataaaatccttactgatttaccccctactccttcacaaggaccagcaacatgatgtggcataggaggcactcagtattacatcacctttctctccgcatacaatttgtaacccagaatggtataattatcctgatttggagaggcattcaatatatacttatcttatatacttatctaaaaatcttgtgtaaaggaaaataaatatccatatcaatagttatcattctctctcactctatatatatatatatatatatatatatatatatatatatatatatatatacatatatatatatactgtatacgtgtgtgtgttctttattgtactgctaatgagcacagaatcataagactccatgttctgctcatgtttaataaaagcaccaatccattttccatatcagtttgaaaatagtggcatgcatgtattatcccataaataaagaaataaataagtctcatgaaaaaaaaaaaaaaaaaaaaaaaaaaaaaaaaaaaaaaaaaaaaaaaaaaaaaaaaaaaaaaaaaaaaaaaaaaaaaaaaaaaaaaaaaaa

SEQ ID NO: 441 - DNA, 3983 bp, Xenopus laevis
ggctacacggcaggattagcgagctctagctgctttgctaccgctgtttcagtagctgtgattgtctggtgagcagcgaatatttcccactcctacaggatctcatggagcgctggaagggcagggtggcacttgtgaccggggcatcagtgggcatcggagctgcagttgctcgggcgcttgttcagcatggcatgaaagtggtgggctgcgccaggagcgttgataaaatcgagaaactggctgctgaatgtcagagtgccggctatccaggcaccttattcccttataaatgtgacctgtccaatgaagaggagattctgtccatgttctcagcaataaagacactgcatcaaggggtggatgtgtgtatcaacaatgcaggtttggcccgaccagagcctttgctgagcggcaagacagagggatggaaaacaatgattgatgttaatgtcctggcactcagtatctgcacaagggaggcctaccagtctatgaaggaaaggaatattgatgatggccatatcataaacatcaacagcatgagtggccatagagttgttccaactgcagttatgcacttttattcagctacaaagtatgctgtaacagccttgacagaaggcatccggcaagagctcagagaagaaaagagtcatgtccgagccacgagtatatcgccaggtcttgtggaaactgaatttgcttttaaactccttgataatgatccggagaaggctgctgcaacgtatgaaagtataaagtgtctgaaagctgaagatatagctagcactgtgctttatgtgctcagtgctcctcctcatgtacagattggcgatgttcagttgaggcctactgagcaaatatcctagggatttagcacatggaagctgagttttgagagaagacttaattacaacttaacattccttcaagggctaacttggaggaacatattaaggattctgacttttggagacttttacccaagaagaaaaaaaaaaagaaacatgggaaatatatttttcttcttaattatgtaaccagtacaaaaagtacattgttagcaaaggaattttgtctttgtttttttgttaatttaatttgtgcttttccccaaaactaaaataatttaattggaattatggttccagaacacttctttggtttgttcatccacataacgtctaatagggattgccttcctgtgtctgtcagatccttctgaatcaaaatggttgattttttaatattttgctttgggtctggtgattgtctgctcttctttatgaaccttttcaattttcctcaattttccttcaagagtttcctctaggtttctatgaagtctttataactgggtaccaaacaagattccgcttgacttttttttttttataaaaattttgtgtctgataacttttaattcaactacatacatgtattaggaaatatgtgtgaaggaaatactgtgaggacaaaaatagaaataattgtttaaatgggtgcacctgatgcttacacactatgcatgttatctaaattaaaggaatgcttgtcttttcactacctgttaaaggcaatttagaacttgtgtgctatcacaatagcaaaattacctctagtgaacctttaattactcatacagaattatttttatgtctgattccgttaatcgacgtaacctcattttaatactgtttttgccctttttggttgatttgacttatttgaataactgttaatcggacataccagttaacatcagttatgctacttgcaaaacaattggctagtgtttatgttgtaatggctattttgatcatatggtacagataatggcaaggcttaaaataatacaggttttggttcctttgatatttttgaaatcagtggtataactataggggaaacacaccccgcagccgcagggaggtctggactgcagggtctgcttcctctattgccaacaagaaccctccctttccccagcgctctcttacttggtggggaaacagagtgcggcagcatggagggatagtgggcggagtctgggctaggagtgggtggagtccaggcgggaagagggcgagaggatggggatcggagtgcgccgggccactctgaagattttttttcaggggggcccagggcactctagtttgccactgtttgaaatgttagagaaccagacactgacatcatgcctggcaacaatacagttggatggtttttttacttatttttttaattacctttttcatattactctcttcttattttacactagtgtcacaattttgaaaggatctacacatagttccaatagctcatgtattttcagcccaccctaagatcacttatggagatgaatgcaacttccataagacacttaccaggaagttacaggatctaccatgccattcatggttcaaaaattctattgtaacaatatacagtcgtttatctgcctaaggataggacttcacggacaatttgtgcattccgacgcgctacgcaaaaacgcaggagtcacgtcggatgcgacagagataaggtaggtgatagaaatgtcggatgaatttgcagcgttcatctgacgcatcacgtcggatcatcgctgcgacaccatctgacagtgcattcgcttacgttgtttctgttgcatccaacgtgacgcctgcgtcggattgcgtggaactcgtccatgaagtcctaccttaaaggtggccatacacgtaccaataacaagactgaaaattttgatggtgcatgaacatcataacgttaatgctgaatcgtcagaaagggctaaatattctttttatttttacctgaatatccgactattcaactttaaacattagtagagtggacaaaagatctttcgtacgaccaatggttgtggggaaaggttataattgtagtgtgcatgaccaccttatagctggctatacacacaaagattaagttgtacgaaacaaagctttgtatgattttcaggttagaagatgtctgacagttaatgataatatccctgcatgtataacataacttttgtacaattgccgtcatcggcagaacgtagtctgatttgttcttttactactttatctatttaatctgaatggtaagtggcaggttgggagattgcagggagattgcaactcgcgatcgtttgtcagacatgggatagaatctttctattgccagctttactgaagtacgtgacctcattatagccagtaactagtttatatttagaaaaatgcatttgtttgcattagacttaatgcaagttttgttgttcccgaactgttggatttatacttatcctttttttttctcatgcaaaacacattcactccatgtttaaaattgtttagcataaaatgagctttgcaacattacatgcctaacctaatattttttctaacggctttactagaacagtgcaagtttatagtttacagtagctgttactgttgttttgtatggttgggaagagagcctcagccaaggcaaacaatatagcatagtttccactattgctataatttataaacacaaatatactctggacaaatgctctttgcacacaaattatgcctttattatacttgtattaattccgccatgatgttgggactggattgggatatcacttgaaaattgtgcatctttctttgcaaacttttctgcctttgattcctaataacttcataatgtaagcatattttttaaatatgctgcccacttctgttctcctatacacaaatgttgaggtgcaaggtaatagtggaaatatatagagaataagttcggcaacacctttaatacatgtgtaaagagaagtcctggttttgctggtcttttacatatatacacacagcccattctgatattgagaaactatttggttgactggatagtctatcaaatacttccaagccaaggaaaaaaaaaaaaaaaaaaaaaaaaaa

SEQ ID NO: 442 - DNA, 2741 bp, Xenopus laevis
gacgccagtctcgcgtgatgtgacttgtggcgttcggattttctgcaagacgggatgctaggaacctgctattaacagtattgcggggaggaaccctgtctggttgccatgctaatgcagtttccatggttaccaaggtccagcattgccacgggtgtgaatagacttgaatgattctgttcttttatgagctatctttgttcatgatgagtatttgtaggacattacatatgctgtccctctacagttgataatttggttacccagcgcagtattccagagaagatggctgacagcttaagaaccttccttaatgaccttacccgtggtattaaagactccatttggggaatatgcacaatctcaaagctggatgccagaattcagcaaaagagggaggaacagaggaagaggcgagctagcagcgctcttgcacagaggagagcccaaaatgaagaaagaaagccagaaaacgaaccacgcattgttaccaggatctttcagtgctgtgcttggaatggtggtgtattctggttgagcctcttcttgttttaccgaatgtttatcccacttcttcaaactattacagcacgtataatcggggatccatccttacatggagatgtctggtcttggctcgaatttatcctcacttctatttttagtgccctatgggttctccctctattcgtcctcagtaaagttgttaatgccatctggttccaggatattgcagatttggcatttgagttgtctggaagaaaacttcaatcctttccaagtgtcagtaaaattatagctgacatgctgttcaacctccttctacaagcacttttcctgatccagggtatgtttgtgagcctgtttccgattgatgtcattggccagatcataagtcttcttcatatgtctttgctctactcactgtactgctttgagtatcggtggttcaacaaaggaatagaaatgcatcagcggttatccaacattgaaaggaactggccctactactttggatttggtttacccttggcttcactaactgccatgcagtcatcgtatataattagtggctgtttgttctctattcttttcccattgtttattatcagtgcgaatgaagctaaaacacctgtgaaagtgtaccactttcagcttcgtctcttttcactggtcgtcttcctaagcaacagactcttccacaagactgtctatctccagtctacgctaagcagctctggttcctctgaaaaactgcccagccctcacccatctcctgccaaacagaaagccactttggggcactgagttagaactaaaagtatccgtaccactacattgctgcactctctcaccaattatgattttctgtgaaaggcacctcaagttcttctctccagccgctcttgtttacagccctgaggcttcttggttccaacagcacttaagtcacattttttatgctttaagtactgacaagctgtatgtgccatgtttgttaatttactgaaaaacctgcctctaataatattagatatataatgaaaccaaaatccatgtgagactgtagcactctgggtttttctaaaaaacgttatcagtgaaatcaagaaatatgtattttttgttatgacactaaaggctcaaaaatggattcattggaagtctgtaaagcaaagagcaagagcaccgttattctatttatcaatggcacttctgtaaatatggccagtttttacacagaattatattccgaattacggaatggccgtctcccatagactccattttatccgaataatccaatttttgaaaagttatttcctttttttctgtaatggtgaaacagtggcttgtgcttgatccaaactgggatatggttgctctctattgaaagcaaaaccagcctattgggtttatttcatgtttaaaggattttctaactggcttaagatatgaagatctaagggaaagatccattatccaggtcccgagaattttgtgtaacaatgtatactttttaaaatagaattttaaatgtgaggtggaaaagacactggtggaaatgtacaattttttaagcagttatagcaattgaatctaatcttcaaaagtattggagagtttgcagatatacattgctggccacaaagactttatacttggaacggaaggctttaacttgcaattatgaacttgctgctgagagtcactagtatcccacacacacaaaaaaggttagatttgaccatttctgcacttgaaacttctatttatattttcctcaacagaatcaaaagcctaccaggcaggaactacaaatttaaagttgtccaggtttattcgcggaacagaagaaaaatgttataccgttttattactgttatttatgtttttctcccgtgcttagctatggctccctgacattgtaacattttggaggtaatgaaattacaaaggcaaagttagcttaaggactagtaaccaaggacaattaatcagcagatttataactctgctttctgaaatgaaataactcctttttgccactggcaactagacagcaaactttgtgccttatactatatatgaagtttaaatgtagagcattttgcttgacctttcatttctttcttgggagacataagctgctgaatggtgtaccaactacataaaaaaaaaaaaaaaaaaaaaaaaaaaaaaaataaaaaaaaagaaaaaaaaaaaaaaaaaaaaaaaaa

SEQ ID NO: 443 - DNA, 2249 bp, Xenopus laevis
gtcacaatgagggagatagtgcacatccaggccggccagtgcggcaaccagatcggggccaagttctgggaagtcatcagtgatgaacatggtattgacccatgcggaaactatattggggattctgacctccagctggagagaatcagcgtctactacaatgaagcttcctcactcaaatatgttcccagggcaatcctagtggatttagaaccaggaactatggacagtgtccgctctggagccttcggacatcttttccgaccagacaacttcatatttggacagagcggtgctggtaacaactgggcaaagggtcactacacagaaggagctgaattggtggactctgtgttggatgtcgttcgcaaggagtgcgagaactgtgattgtcttcaaggcttccagctcactcattctctgggtgggggcacaggctctggaatgggtactctcttaataagtaaggtcagagaggagtaccctgaccgcatcatgaacacttttagcgttgtcccttccccaaaagtctctgacacagtagttgaaccatacaacgcaacactttccatccaccagctggtggaaaatacggatgagacttactgcattgacaatgaggctttgtatgacatctgtttccgtactctcaaactggctactccaacctatggtgaccttaatcatctggtcagtgccacaatgagtggagtgaccacttctctgaggttccccggccaactcaatgcagacttgcgtaagctagcagtcaatatggtacctttcccacgtctgcactttttcatgccaggctttgcaccactgactgcccgtggcagccagcagtatagggcattgactgtccctgaactcacccaacagatgtttgatgccaagaacatgatggccgcttgtgatcctcgccatgggcgttacctgactgtagccactgtcttccgaggacgcatgtctatgaaggaagtggatgaacaaatgctcgctatccagagtaagaatagcagctattttgtggaatggatccccaataatgtcaaagttgcagtctgtgacattccaccccgtggcctcaagatgtcttccacattcattggcaacagcactgccattcaggaattgttcaagcgtatctctgagcagttcactgccatgttcaggcgcaaggctttcttgcattggtacacaggagagggcatggatgagatggaattcacagaggccgagagcaacatgaatgatcttgtgtcagaataccagcagtaccaagacgccaccgcagaggaagagggtgaaatgtatgaagatgatgaggaggagtctgaagctcaggggaaataaaggaaccactgcaaagccagagaacatcagagatagctccccacaggtttaggaagtccactcatgctacatgtgttgcttctaagttaggattatagtaccctccagtttcagaacctgtgtctcattccacaattcccttcaattttctttctgctgacaaagagcaatgcagtaattactatgcttatagctggtatgaaggtgaagatctttctttacagaaagtcattgtaccttgatgagaaaattgggacacaattgttactaaaagacactgctaaaaggtactgcaccttaataacccttttaacgcttgccagtttcagcagcagagcaatgttcagcattcaacaacatatcattgcaggctccagtgaacagatttaaacattttaaactttaataaatgccccctgaggaagtgtttttgttataatgattgaggctaacaaaggagaaagcttttaaaaatgagtgggttatcattgactagtgatataagcttatgatgcgtgtgtatgagaggaggtttcctcccctgaagagcttaatgtttaagcaaagcagtaggaaatatgaaggtagctgtagatgtgagcatactgtattcttgggatctgaggaagtattttatgctaataggaagatatgtgcatttatggcatctgctgagacgtacactgcataatgctcaagcagcagaaagatctcctcgtcgtacatacacatttgattgtgttttaccattttatctgttctgtctgatatctttttatgttttttttttgtctgtatctgttttactggattatttattttttaaataaataaacttcctgctgttcaaaaaaaaaaaaaaaaaaaaaaaaaaaaaaaaaaaaaaaaaaaaa

SEQ ID NO: 444 - DNA, 2024 bp, Xenopus laevis
gcgacctcttccgattggctgccaagctttgactgctcaggcaaaggttaagagggctggagaaacccggaagcctggcgttgggaaatcaggtgtgtaatatctgaagccaggaatcatttgcaaaagcagaaatacaagtcttttcttacagacaggctgctacagttaaatgtctggttttacactgagagcatctggcaaagaagaggtatgagcccagtgctgcaaagtcccaaccctggtgttgaccattactccagtctgtcatggggagcaggaaatcctcctccagctccagtgggttccccgcctatctggaaaaaggtgttatatgagcatcagccgtttcctgataattatgtggataaccgcttcctggaggaactgaggaagaacatttatgtacgtcggtatcactattgggcagtggtgtttgaagctggagtagtaatccaacagctctgcagtgtttgtgtgttctcttttatttggtggtacatggaccaggatttgctgtctcctcagaagctgtgtggggttggcttggctttcacactccttggctacatattatttgatgctgtagaccaaggagaaggaagaagagacagtggaagaactcactgggctgatctgaagagcgcactagtatttgtagcgtttacttatggtttttccccagtgcttaagacactgactgaatctattagcactgacacaatttatgccatgtcagtccttatgcttcttggacacctggtcttcttcgactttggagccaatgccgctgtagtttctagtactctttccataaacatggccatttttgcttcagtttgccttgcttcacgacttccgcggtcccttcatgcttttgctatggtcacctttgccattcagatttttgctctgtggccgagcttgcaaagaaagctgagggctaacactcctcgaacatacataggcgtaacctttctctttgccatttttgccttggccggattattgagcatttcgggtgtgggggctttgctgttttttctcctcctcctctccgtggcatttttgtgtccgtactgcttaattcggctgcagctttttaaagataatattcatggaccgtgggatgaagcagaaattaaagaagacctttctcgcttccttaattagatatgtgcaagtaaatatgatgtattgctgacagctttgtaaggaagaatacagggacaattttcttttttaaccattgggggttattttactacagtttttgattttatttctatggagttggtcagttattcttagtaagagtttagataagaaacggcaagcactccgaactccactcttatggtaaaaaaaacgtttcgtatacaaggatacatagtcatgactacgtatgcttgtatacgaaacgttgggttcgggcgatgcacccgggccactcgacaatttgggtgagtgcttttctgccaaaaggtgttccatacctaagcggaggacctgggttttatacacccaggtcatagtatttacagggtgagcggttttgtgttttgagacccataaattgcaattaaatataattaattcaagcagcacccgtttaagtaaaacaaggaaacaggacagaacagcttatatttatggctcatattgcaagagtttagatatcctcccctgagactacatagccatttattggcctgatcaattactttttaatctatttatttacgtccatattccacatgagtgtgacataacatttgtgggtttataatatattctgaagacctgatttctggtgtagggagtttgccttgctgctagtctgtttttataattttaaattaatttaaccccagtatggcaaacaggtccattttcacccgctgaaagacccagctcaactctgacctattttcctcttttgtaccttggctgtggcaaatgattgtacaattcttcttttaataataaatagttttttgtttctgaataaaaaaaaaaaaaaa

SEQ ID NO: 445 - DNA, 1983 bp, Xenopus laevis
gcagcagggaaatacagatgcgcagccagtgttacaatgatctgcttgatgtttatgcatctctgacttgtttcactctccatatgaatgtacaaagatgtcaagaactgtgttgatttttaactgtattctaaccagccctgggtgatgcaacgaattaataaaaacgtgattttggctgttctgactgcagcaagttcattattcctcatttttcagttgttttactttaaatattatttatctggaaagaatggtcaaggtttttctaacctaaatggaatcatatcatcacaagagactatacaatggagagtggtgaagaagtttttaaacttggtgactaatcacaaagtaccagtatttgtagtggactctgcacttttacaagtaatcagcaaagacgtggaacgtttgaaaagcacccctggtattcatccccagtgtcattgcttctgtgagcacagagatgttactacttttggacttcaagatgcactatgggaggcaaatgaaaacttttttcgagctgcagagaagatgggatttcagtggcagaagtatgagggacgagatccaagacttgaagggatcgaggacctgtcgggaacaaaaatcccactgcactacctcttcaaaatgacatctcatatcatccacttggttgtgttttatgaaagaagtagcaactacctctggcatgggcctctaaggctaaaacgaaagatggacagaaagtttgtgcctttccggaaacttcagtttggtcattacgcaggagcttacaatagaccagagctgatcctgataactgctgatcaaataaagatgtggattccaaaggacccatcagagtttttgagagagacactgcactcaaggtttcttgaatgtcggtacaaggaagctcgatcatttttccagctgtatcctgatgactattccgttgatgcaatagagtttagaatgcacgcaaagcggctgttacacttggcaacatcaaccttgggagatattggagtcaccttttggttaagcagcgggacctgcttaggctggttcaggcagtgtaacattataccttacagtaaagatgtggatttagggatatttatacgtgactacaaacctgaaataatcccagcttttcagaaggcaggactccaactgaaacacaaatttggcaaggtggaagacagtctggagctgtcttttgttgagaaacacaatgtgaaactggacatttttttcttttatgaagaagatcattatatgtggaatggaggaactcaagctaaaagtggcaagaaattcaaatatctgtttcctaaatttacactttgttggactgagtttgaggagctaaaagtgcaagtgccctgtgaagtgaaagaatacgtggaagccaattatgggaaaaactgggatgttcctgtgaaagactgggactggaaaaactctccacccaacgtgcagcccaatggcatgtggcctgttgatgagtttgctgaagttattcagatctactgaagaatacatggaaaacatacatggctagggcataataacatatcagaaagttctattcttaacctgaattctgtcttggtcctttatgtatactccgatctggattttttgtgcacctttaatatctgttagttccttttagtgttttgtggtgtgaaatgcaagcaaagtgtttatataatgcaaagtattcttgacctgaagattatattatttaagggaggttttgaccacttttaaaataccacttaactaacaatgcaagttacttgttttatttaatttctctctcagagataacgtacattattttaaaaagttaacatacccttctaataaaaagtataatttttaaaaaaaaaaaaaaaaaaaaaaaaaaaaaaaaaaaaaaaaaaaaaaaaaaaaaaaaaaaaaaaaaaaaaaaaaaaaaaaaaaaaaaaaaaaaaaaaaaaa

SEQ ID NO: 446 - DNA, 4429 bp, Xenopus laevis
ctcccggggtcctgtcatggcggcggaagccggtggaggggaacctttggtgaagttcgttaagctgagcgggagagcggcaggctctaagaagaaggtacgctggtttccagttaggcgactcttcactcactcctgtcccagcctcaggattcctagcaggtttttaagagaaggtcggagatctcccccagcaaggagtggtcaccgatgtgtggcagacaatactaacctttatgtgtttggcggttacaacccagactatgatgagtctggagggccagaaaatgaagactaccctctatttagagaactctggagatatcattttgctacaggcatgtggcatcagatgggcacagacggtcacatgccaagggagttggcatctatgtcgttggttttacatggtcacaatcttctggtgtttggaggtactggaatcccatttggagaaagcaatggtaatgatgtctatgtctgcaatgtgaggtacaaaaggtggtcaaagctaaactgcagaggcaagaaacccaaccgcatctatgggcaggcaatggcaattatacatggctttctgtatgtatttggaggaaccactggttacatatacagtacagatctacaccgacttgatctttcaaccagagaatggattcaactaaggccaaacaaccccccttgtgatttaccagaggagaggtacagacatgagattgcacatgatggacaaaggatatatgttttgggtggaggcacatcttggacagcttactcattagagaagatccatgcctacaactttgaaacaaacacctgggaggatattcccactaagccacatggcaatctaggttttccagcagccagaagatgccacagctgtgtccaaataaaaaatgaagtgttcatctgtggaggctataatggcttggttatcttgggagatctgtggaagctgaatttgcagacgtttcagtggacaaagcttcctgccctcatgcctgaacctgcttatttccattgtgcagcagtgaccccggctggctgcatgtatattcatggaggtgttgtcaacattcaacaaaacaaaagaactggatctttgtttaaaatttggctgacagtgccaagtctgctggaactttgctgggaaaacctgctaaaatatttccctcagctttgccagctacccacacaccagctccttcagcttggactatcacaggagctcatcgaaagattaaaatgatgcccccgtctatacacatccatcttgctcccaactacagttcagctaagcaatggtagaatccctggaaaggagcatgctgctggcaagaacatcagtggcctttaatttgtttcatatttaggaaaaccagcacatttgtcagtggtatttacccaactgcctatactggacaaggcatggaaacttttaagactatttattcttgtgcttttatgttatttattacttttttttccggagattaacattttcttcactctggatttctgtcctgcatccctagggaaactatcccctcttttttggcataagctttttcaattgggcttacgtagaaaaggttcataaacaatatgaggttccagaaataagtataaaaaacctgattccaaaggttgaaagaaaaccatgatacttatagaccctttcccacaatcccttgggttcacagtataatgcaaccactctatggtgaagtgatggattctgggccttgaactccctctgctttccatagaggatgttcaggtcccggaatccaccacatcacaatggaacaaggggagagacggttgcattaccctgtgagcctagggggatgggataatggttttctttcaatctgcagaatcaggtctgtctgtgtaacaaaacaaaatattatttagttctagaacagcagattgttttaatgtaacttttctgcttaagcccaagtgaaagagctcatgtcacaaatatttcaaactgaagttgtagctgtgactgtatgagccaaccgctgcttgtcattggttaatgatgcaacacaacaggctgatattgtacagtagaaaatctatgcttgtctcaatgctgaagagctacatgaatgtcccaaactacttctagtagatttaaaaggaatatgtttgttttctaaaggaatcaaacacaatcaaacacaatcagacataagcctggctttttaaagtggacatatactttgcatcttttttagacttcataatatttgcagttttgtactgctattaacataatgagttacaaaagcatcttctgctcctctgtcagggcggggggctagagagtgtcaaaagcttaagttattgatgcaggaagtatctccttagtcttttctgctccattctatcattacattgttatgagaaggaaagcattaggagcctcttccagtatctttaactttatcctctgcccaaatagaagagctgtggctgctcctctaacacattcatgagatcagcagccataaatcaattgctgcaaacgtacgaagtgctcccaagcagctgtacaatgatatgggcagggttatatttgtgccattagaatgtagtgtctgtgttacagcctgggctttatacccaaacattctggctgtgctgcctcattactattttttaataactgaaaacaatattttagtgcctttttagtttatcatcaacataatccgactggctcaatgggctgagcaataatatcttgttaagggggatccaaatcatttattgtccaattctttgcagcttcttgtaactgatagaaagagactcacatcatgtggccaaagcatttcccctggattccattgtacaatatggggccctttgttgcattgagtgtagatggagtgtcagggttaggacatgttggacaaagaactataaagatgcctgaccatttgttttgcattttcttccttgtaatgtcaccacatagtgccggccactatttctagccttttgttttcatggctggatttaaagctgtattctctgattttgcttcttattgctgctgcaacgagtctgtgaagccattgtcatttttaaaaccattgtttcttagataaaggggaagttcaccttgagttgcaattttaaaaagctcgatgtagggtcacacggatattttgtaatgttctttttaataccatgggtttttgttttttgaaaatgtaattgaatagacactctaacgattgctcctcctattactctagagagtaaagatttttatatttcccaaacggattctgaatttccttctgccaatgccatgtgccccctcagatgagaagtttgtagcgtgtagaccatttgtaattgggaggtcatctcttttaaagcttctaaatggactttcacatttaatttgctctctgggcatggaatgtttaagcagaagaaggactctcagctgaaaatgacatctttaaattcattttaatgccaaacctttcagtgtctgctttctggttgccagggtgacctattatagcaactaaatttcccttgagtacatacagcttctcttgctaataaatgcctctctcaaatgtccgttcaatcgaagcttctctatacctttcccaaatatacaatttgttcctgaagctaactggatcataaattacattgtacaggcacttgagacccaactgccatctgtctgcagtctaactctgcttgtgcccaatagcggctctttggggcatcacaaggggctggaaatgcaacttggtgctactcaatgggattaggttttatccctgtagagtttggggaaagatgatagaaaaaccaatcattcatattcacaacaaataatgggcagtgctaggtttttggattcactctacggcacaataaaaaaaaaagcatctataaaaggtaaacttcccctttaagaagtgttcttatctgaaatgcatgaagctgtgctacttttatttctgcacttagggctaaatactggggagagctgctgctgcttcttgttttttcttttcaaaatgaaacaaatgctgagattgtgacgtctcgttattgctcatagatttcaacattaatgttattgtactgagaccagactgtgccgtccagttaattcagtgtgaaacgcgctgctctacactggaacacatgactgacacaactgcaacaaatctgattccctccgcatggtgtacaaatatgtgataacttgtctcgtggctttgccttttgaatgctgtacttttattgtaaaaccaatgaagtgcaatattttatttttactccatgtattgtcgcttttttttttttcctgattaaaactgaacttaaatgatttttattttcatgcaaaaaaaaaaaaaaaaaaaaa

SEQ ID NO: 447 - DNA, 1184 bp, Xenopus laevis
gggggagtgtgtagggcaccaagatggagaaactacgttgtttgctgcagagaactttgggcacagtccggcaccacatgggcacagaccagtttggcaataaatactattttgtccctcagcagaaaacatggacaggtcgctcttttagagagagaagatttgtggacccagtgaataaaaacacacatgaatatcagctcggccacatccctacagaatgggaggcctggatcagaggcaagcggaaaaatcctccgacaatcgaggaaatacttcaaaatgaaaaatcaagagaagagataaaaaccaaggcagaagaagctttggagagggacacattaaatctcgcagcaggacacagagacgggctcgttgctcagccaggcaagactcagattaaaggacatgcctccgccacgctgtttgggaagcaagtgccctcggaggagccatccagcactgctaacacctttcaaccgggatcctgggccgcaccggcagctgcagaccaaaagaagtgatccatttagaggggttgttcacctttaaaataacaataataataataataatagcatgatgcagagagtgatattctgagactatttgcacttggttctcatttttattatttagctttttattcagcggatctccagtttgtaatttcaactgtctggttgctagggtccaaattactctagcaaccctgcattgatttgaataagagactgggatatgaataggcgaggcctgaatagaaagataatataaagaagcaataacgatacatttgccttagagagcatttgttttttagatgggggtcagtgaccctcacttgaaagctggaaagagacagaagaaaaaggcaaattattgaaaaaggattaaaatgaaaacatgaaggccaattgaaaggttgcttagaattctataacatacttaaaggtgagccacccctttaatacataaaaacacttttctaggtgtgtgtgtgtgagaaataaaatgtgttattgttgatcttgtcaaaaaaaaaaaaaaaaaaaaaaaaaaaaaaaaaaaaaaaaaaaaaaaaaaaaaaaaaaaaaaaaaaaaaaaaaaaaaaaaaaaaaaaaaaaaaaaaaaaaaaaaaaaaaaaaaaaaataaaaaaaaaaaaaaaaaaaaaaaaaaaaaa

SEQ ID NO: 448 - DNA, 593 bp, Xenopus laevis
ggggactgcagactgagcaaagtgacgtgaagatggtgaggtacctgaacagcctggaggaataccactgtgcactgaaagatgccggtgagaaacttgtggtgattgactttactgcagtatggtgtggcccgtgccaaagaattgccccagactttgaaaagctcagcaccgagaatcctgatattgtattgttcaaagtagatgtagataatgcatcggatgtggctcaactctgtggagttcgctccatgccaacattcgttttctacaagtctggcaaagaggttgagcggttcagtggtgctgatatatcgaaactgaagagtacgatcagcaggttatgctgaatcatcattgtttacaaaatcttttacataattatatttttctattatccttggaaacatatgacttctttaaaaaaatacatgtcttcttatgttccaatgtgatgtcttacgtgatctttaatactttttacgtgcaaactgttgctgcaattaaagctctttacatacacaaaaaaaaaaaaaaaaaaaaaaaaaaaaaaaaaaaaaaaaaaaaaaaaaaaaaaaaaaaaaaaaaaaaaa

SEQ ID NO: 449 - DNA, 1916 bp, Xenopus laevis
gaatcagcagcaaagatgccgctgtacgaggggttgggcagcggcggagagaagacggcggtcgtcatagacttgggggaagcatttactaaatgtggatttgctggggaaacagggccacgatgcattattcgtagtgagataagaaagcctggcatctctgagcctataaaagttgtccagtaccatattaatacagaagaattgtattcatatctaattgaatttattcacatgctttatttcaggcaccttttggtgaatcccagagatcgccgtgttgttttgatagaatctgtgctgtctccgtctcacttcagggaaacactcacacgtgttcttttcaagtattttgaggttccctcagtgctctttgctccaagccatctcatgtctcttctaacccttggaataaactcagccatggttttggactgtggatatgcagaaagcttagtgctacctatatatgaaggaattccaatccttagctgctggggagctcttcccttcggaggcaaagcgattcacaaagagctggaatcacagttgttggaggagtgcacagccaatacaggaacagccaaggaccagagtttgccatctgtaatgagcagtatttcagaagaaatagtggaggacattaaagtgcgcatctgctttgtgagtgacctccagagaggactaaaacttcaagcagcaaaatttaatttggatggcactgctgagcgccccgtgccaccacctgatgttgactatcctttggatggacaaaagattttgcatgttaaaggttctataagggattctgttgcagaactgcttttcgagcaggacaatgaagagaagtctgttgcttccttaatactggattcacttgttcagtgcccaatagatacaaggaaacagctggctgaaaatctggtaattataggcggtactgctatgttgcctggattccttcaccgacttatggcagagatacactacttggtggaaaagccaaaatacaaagaaactctggctaccaagatctttaaagttcacactccccctgcaaagccaaactgtgtggcatggcttggaggggcgatttttggagctcttcaagatatcctggggagcagatctgtgtctaaagaatattataaccagactggacgtataccggattggtgttgcctgaataatccacctcttgagataatttttgatgttagcaagtctggacccccaatgatgaaaagagctttttctactgagaagtaaatgctttgccttgcctcgccaaaccttgctttgcttgaagatgcgattcttctgaaagactgatatttattacacataataacaaacctgaaattgttctaactgtaaagccttgggtttaatgttgcctttttttaaatttgttttacctctctagcaaattttaggaaatcgtcaaatgatccttgtaagccaagaatgtccagtctaccttacaaatttccttctcaaccagctaaggaggatgggaattgtggtggaaggacagctggagggatgcagctagtattccctcttacatttgtgtaggttgtggacaaacctattattttgtgcatattattaaagcaatgtgcagaatgtctgctttgtaatggacctaaatatcatattggcatggaaaccctcagagcatattatactgttagtttaatgtaacggtgcctgggtattgaacatattgacacatattttaaaggaaacactggcaacaacatggacatctctattgtaaacattccttcttatcaaacactaacccaaatacacttgataaataatattaatatatgtatatatcatcccatgttttgcaattcagtcacaataaactccagagcagcgcacaaaaaaaaaaaaaaaaaaaa

SEQ ID NO: 450 - DNA, 1244 bp, Xenopus laevis
ggggagctgtcgcatcttcttccagcttctcgttccattcactgggtgcctggtgaactctctatccgtgttgtggctgctacagaggcgacatttgtatcggactgactggctgagtcaccaccatggtgtgcggaggcttcacctgctccaagaactccctgtgtgtgctgaacctgctctatattatggtcagcctgctgctgatcggagttgcagcctggggaataggatttggcctcgtttccagtttgcgagtggttggcgtcgccgttgctgttggaatcctactatttctcattgctctggttgggctcattggagcaattaaacatcaccaggtgttactgtttttttacatgatcatcctatttttggtcttcgttgtacagttttcggtatcgtgcgcatctctggccttaaacagtgatcagcagaaacaacttttggaagtcggctggaaccatacaaatggagctcatactgatattgaaaggagcctgaactgttgtggatttaaaacctattctcaaaatgacacctgtggagctacctgcacacagggttgccatccatgtggtccaataattgaaaaacatgcagaagaagtgctaagagttgtgggaggaattggttttttcttcagctttaccgagattcttggagtttggctgacttacagatacagaaaccaaaaggacccaagagcaaaccccagtgcatttctttgatttagacaacccaaagactactccttcatttctttatttaatgcatctctgcagctttcttggttgctgtggttgatttgtttaaaggacacttcttcaactgtgaattttttttccttttcacaggaagtagaaaatatgatctcagtttaatggctggtcaaaatgaaagaatgaagaatcactgaccattgacactaaagcttaaggcgctcttaccattattggagcctctttgggatttattggtttatacgttgtagataaagtaatgtatatccatccctctcccaatagtaaggcaatgctcatcagttcactatcacatttatatgttaaactctttagagctgttttttttaattgttaatgtatacattctgtgtagcaattgcaactattaagttcttttagttctttttttttttttttttttacatacccgtgctcaataaatcaaaatcatgttataaattgtataccaaaaaaaaaaaaaaaaaaaaaaaaaaaaaa

SEQ ID NO: 451 - DNA, 1369 bp, Xenopus laevis
ggggactgtgtcatgccgcactgactggggaggacaattattagtaggaccggcttgtgctgctgctgctgtcaggcaggtcaaatagtgagaaagaaaccagaacgcctcggaatcatggtttggtgctgccgggtgctgctcaggaagtatgggaattttgtagacaacttgagaatctacgttaaaggtggcactggtggaatgggcctgccccgtttaggaggtcaaggaggcaatggaggagatgtatgtctgctggcaaaaaaaggagtcactttgaagaatatcaaagacaagtatccccataagcgtttcattggtggggttggagtcaacagtagtgtgcgtgcactgaaaggcctggcaggagaggtgtgtcaggtggaggttcccccggggattgtcataacaaatgagcatggagtcaaaattggggagcttgataaggagggagacgaaatccgagtagccagggggggtcatggtggtattttcaagacagatttccttccatccaaaggccagacaagagtaatccatttggacttgaagcttatttcagatgttggattagtagggtttcccaatgcaggaaaatcgtctttgctcggcaaaatctcccatgcgaaaccccaggttgcagattatgccttcacaacggtgaaaccagaactgggtaaaatcatgtatcctgattataagcaggtttcagttgctgacctcccaggtttaattgaaggggctcattacaatagagggatgggacacaagtttctgaagcatattgaaagaacaaagcagctcctttttgtcgtggacattgcaggattccagctctccgccattactccgtgcagatcagcctttgaaactgtccagctactgatcttggagctgcagttatacaaggaggagcttctagacaaacccgccgtactcgcagtcaataagatggaccttcccaatgcagacgagaaattgggggaattattaaagcaacttgaaaatcccacaggaaacctgcattctctgccagatgagctggtcccagagagacaaatagagtttaaacacatcgttccagtttctgctgcgacgggtcagggactggaggatctcattggctgtattcggaagacaatagatgaacaggcggatgtgcaaattcaagaactggctcaggagaggcttcagagtctccacaaagagacaccaaggactgtgaaaagaaactttcaaacctccccccggcacaaacaccactgactccagcctaacgcacaagtgtcatgttgtacagtacacacgccctccaataaagcttttgtaaaaggtcaaaaaaaaaaaaaaaaaaaaaaaaaaaaaa

SEQ ID NO: 452 - DNA, 1717 bp, Xenopus laevis
ggggatcacacaatggctgtagcagctccgccgcgtcctaaccttgtggtgaagttagtgatgactggggactcggacgttgggaaaacctgtattctcacccgatttgcagagaacactctcccctcttacatctccaccgtgggtatcgattttaaaaccaaaaccattcatgttgctgagacagcattaaagctccagatctgggacactgctggacaagagaggttccacacgctcagtgttagttatttccgtggagctcagggctttgttcttgtttatgatatcaccaaccctgcttcatttgaaaacacagctgtgtggatgagagacattaaaatgaaagccggtgaggaggtagaagtagttctcttaggaaataagtgtgacagagaagatgaacgtgaagttgcaaaagagaaaggggagaagcttgcttgggaattcggaatacccttttttgagacaagtgcaaaagaaaatataaatatcgaaaaggcatttataacactggctgaagctatatatgcaaagaaaggatctttattagttaatcacaatgtagtaaatttgcaagatacgaagaaaaagaattcctgcctgacgtgtagctgaggctgacgcaacacaccatattgcatgtgatctgaaaagcagatacaggactaaattaaattgtgtgtacagtatagctatgtggaccagtattaaatattatgtgtatatctgcttaagaatcctaatactttgggggcaatttatcaaaatgtgaaattagagcttagcaaggataaattcacccactctccatttattcctagggatttttagaagcatattaaccaaatggtgaactctaaggggccgattcactaacttcgagtgaaggattcgaagtaaaaaaaacttcgaatttcgaagtgttttttgggctacttcgaccatcgaatgggctactacgaccttcgactacgacttcgaatcgaactaaaaatcgttcgactattcgaccattcgatagttgaagtactgtctctttaagaaaaaacttcgaccccctagttcgccatctaaaagctaccgaactcaatgttagcctatggggaaggtcccataggctttgctaagtttttttgattgaaggatattccttcaatcgttggattaaaatccttcgaatcgttcgattcgaatgattttatcgttcgatcgaaggaataatccttagatcgttcgatcgcactatttgcgctaaaatccttcgacttcgatatccgaagtcgaaggattttaattcccagtcgaatatcgagggttaattaaccctcgatattcgaccctttgtgaatcggcccctaattgataaataaacttctaaaaatcccaaaggaataaataaaagtggcagaatgagggtgatgagctctaatcttgcattttgttccatctgccccttagaatcatttatttaagtgaagtttaaaacatttagaactatccgtacattacactattatattattgttctaagacaatgtttttgccttgttttagtcaaactaggcttatgttatccctgtgatatagtaaattattcagctttgagctacaaatctaatgcattaatgactataaatacttcaaggtacctcttaatgccccattgtactattttgtaccacttcaaaaaaaaaaaaaaaaaaaaaaaaaaaaa

SEQ ID NO: 453 - DNA, 2802 bp, Xenopus laevis
gtctgaagctcgtagtgacggcgggagggaagctcggtactgtgactgctgctggggcaggaagctctgtgtactgacataatgagtgagacggagaagattgaagaggccgcccccccgtacctgtgtgaggagcccccagagggagccgtcaaagaccaccctcagcagcagcccggcatgatttcccgtgtaaccggcggaatattcagcctgaccagaggggctgttggcgccacaatcggaggcgtggcttggattggagggaagagttttgaagtgaccaaaactgccgtgacgtcggtgcccagtataggcgtcggcatcgtcaaaggaggcgtgtctgtagtgaccgggagcgtggcggctgtgggatctgctgtgtccaataaagtgtcaggaaaaaagaaggacaagtccgactgagccaagaactctttattgagagattataaaaggtgtgactgggcatccgccacacaaacgagccaccgccgcagccattttttattctttcattttttttttgttttccaggtcaggttgcggcggtgcttgtgagctagccaatggcgtcgcagcaggcgtgtcctcagactatggcggctcattgaaactgcaatgcaaacgttacatttatgactcccaaacccatttacgaatgttcagctgccccaccccgggtcgacggtgaggttgtcgctagcgtagagcagaataggccgccgcccgctttctacatcatcaccggagacgcagggaaaaaaaaaaactccaatcaatgcaatggaaggaccctggagctgcatttttgtattttttacttgtccaagatttcacccctttaagtccccgcctccaccttgagacatacaaaaaaaaaataataatgttcatatttatgtttattatacaataaaatgaagcttggtttttttttttttttttttgcaatagatatcaatattgtctcattatggggttccaattattttctttatttatgttagtttgccctttattcgtttgctctaggacaggtcgttcctctgctctggggccaactcacaactcccggccgagggaagctgggaattgtagttcaacaccagcctattatgttttagcctatattctatccattgagtctgaacatcttagtgtcttgtacattagcaggttcctatttgcaggtaaattcctgatgtcgttctctgatactatgtataatgctttaaagggcaagtaacacccagaacaagaatagtctagatttacttgtagaaggctgcagctggcaagcttctatctgctttgcctttaccattcaaaatatgttatgtcattcaggctgctgactggttgctaaggcaaatacagccctaacaaccaaataagagatacaagtcaggagctgcaaatagcaatatatctgataaagtctgggagggcattattcccccctatacatgggtcgagagtagtgatgggacaatttatttgacaggtgcaaatttctgcgtttcgctgccggtgtcatataattttttttttttatcagaaagctcccattgactttaaagcgcatcaaattgacacccgtgtcaaaattagcatttcgcaaatttttcgccatttagcgggaaattcacgcattttctggcgaagcaaaacgggaaaaattcccccatcattagtcgagagttccaatgtctctctgcatatagcgtctcccagattaaataactgtacaatgtaccaaggcaaatccaatcaaaaaatataccaactttaccataaattcattactgataatcagcaggtttaaagtggtttgtaaatgtaatccctactgaaagctgcactcactgctgcttctgactattgacaccctgtagcagaagtcgactcttctccagccaagattctacttcccacaatccctgcaggccatttgtttatccgctacattgttacaatatccagaaccagcagtgccaagagcagatattgcaactgcatttccagagacctttaagactatcaataatgtgtaatgattgtgtactggacagttgcttcattagagtaaattgattcttttaggcttacaatctattcagctatttttattctgggctttatttaaccttggatattccatctgtatgcaagaggttgactttatttcccctttagggcagagagacgcgatgcgattcggggagattggtcgcccggagacaagtctcgtcttcttcgggacgactagtctaccccgaagtgccttcccaccggctggagtgtggatcgccggcgggatggcagtcggatcgtttcgttttccaaagtcacccgaagttttctcgtgaagcaacttcgggcgactttggagggcagggcactccgacttccatcccgccgacgatttgcattcttgccgcaggggaggcagttcggggagattggtctccctgaggaggggatttgtctccgggcgactggtctccccgggtctgagtttgtgtctatgcccttgagcttcttgttttatgagaccgtaacccccttactttgtatgcgtttggctccctttacttcttttatcagaatatttgtgtttgtctcatagtaaataagcagagcctcaatgtgccgagacttcagatatagtcgaccaatcgaactgtgaattgtgctgtgacttttttttttgtgcctgaatagatttaataaaatatctcttctgtaaatcgcaaaaaaaaaaaaaaaaaaaaaaaaaaaaaaaaaaaaaaaaaaaaa

SEQ ID NO: 454 - DNA, 4053 bp, Xenopus laevis
gactctcagctgtgtggtcctgccatgatttttcctgtagttattattcctaagaaggaacagggacattatttcaaggctttctatgtacgctggagcggtactacaagcttatatgctgatgaatcgttggaatgaatacacaaaaggaaaagcagcccttttagattgaacagcaaagactgtcagcatgcatggttgatgctaaagatccagaaagatacagttttttgccagttttcaacctttggaccgaccagttaatgtttcactaattacagtgcacttgtacgaccctctagccctatcttctgaggtgaggagatataaagagacgaaacagaagttattttgttgcttctcattctgacggcaccatgggcaagggattttatgtcagcaagcttgtattagctgttggcatcatattcacggtggctgccgtgtctactatcatagcccttgcagtcgtttactctcaagaaagggccaaaaataatgatgttgctaagccacctgaagaaacaactacaacatcgagcaccagcacatcaacagccaccactgttcagtccaatgatccttggaacaagtaccggcttccaacaaccttgaagccaattcattatgatgttgagcttcagccatacttggagaaaaatgcagctgggctttatgtgttccatggcaaaagttctgccttcttcctatgcaacacagccactgacctcatcttgatccacagcaacaaactcaaccacaccaaatttaataactttgatgccaaattaatggaaggcaccaaggaagtagctctgaagggcacattcttccagaaagacaagcagttcttagtggtacaggttgcggagagtctgcaggctgggaaagagtatagcctttacacagagtttattggagagctggccgatgacctggctggattttacagaagcgaatatgtagaagacaatgtaaccaagatcattgcaacaactcagatgcaggctcctgatgcgaggaaagccttcccctgctttgatgagccagcaatgaaagctactttcagcatcactctgaagtacaagaaaccttacaaggccatgtcaaacatgcaagatatagaaaccaaaactgagggagactggatgatcacaaagtttgacaaaactccaaagatgtccacatacctggtggcattcatagtgtcagaatttgagtcaattggtaatgatggcaatgataccgttactggggtaaagatctggggtcgtaaaaaagccatcgttgatgagaagcaaggggaatacgcactcagtgttacaaagccaatccttgatttttttgagaaatattatcgtaccccctaccctctaccaaaatcagatcaggtagcactgccggattttagtgcaggagccatggaaaactggggactggtgacatacagagagacagccctgctattcgacgaaaatgtatcatccattggaaataaggagagagtagtcacagtagtagcccatgagcttgcccatcagtggtttggaaatctggtgaccataagatggtggaatgatctatggctgaatgaagggtttgcctcctatgtcgaatatttgggtgctgacgaagctgaacctgattggaacataaaagacttgatagtactaaatgacgtgcacagagtcatggctgtcgatgcattggcttcctcccatccactcacatcgaaggaagaagaagtgaactcaccctctgaaattagtgcgctttttgactccattgcttacagcaagggtgcctctgtcatcagaatgttgtctgaatttcttacagagcctctgtttgttaatggactggcgagttaccttaaaggttttgaatacgacaacactgtatatagtgatctttggacacatctgcaaatggctgtagataatcagactgcagtgcaacttccattgcccatcaaagacatcatggatacatgggtcctacaaatgggattcccagtggtgaaaatagacacagcaactggaattgtcacccagaaacacttccttctggatcctgactcagtggtcacacgcccatcaccatttgattacaaatggattgtaccaataagttttcaaatatccggcaaaaatgaccacatatggctacaaaaagaatcagacactgttgataagtttaaaataaccggaaatgactggcttctggttaacctaaacgtcattggatattacagagtaaactatgatgacaataactggaaccgcctactaaaccagctacaaagcgatcataaattagttcctgttattaaccgtgctcagatcattgatgatgcctttaacttagccagggcaaaacaactaggcataacaaaagcactggataccacaaaatatatctcagcagacagagagtatatgccatggcaagcagcactgagtggtctgagttactttacacagatgtttgatcgcacagaagtttttggatcaatgaagaaatacatgaaaaagcaagtcattccactatttgaacattttaagaatgtgacatccaactggacaatacggccattatctctaactgatcagtactgtgaaataaatactctcagcactgcgtgtagctatgacgtagaggagtgcttagagtttgcctctaaactcttcaatgcctggatggtcccccctttcacaaacaacatccatccaaatctgaggacaaatgtttactgcactgctgtagcacagggaggcgaagaagagtggaattttctgtgggacagatttcaggaaaccgatattgcacaagaagcagacaaattgagagcagctctagcctgcagcaaggagccctggatcctcaacaggctactggaatactcactggattcaacgaagattcgcagacaggacgctgtctccaccatcagcagtgttgtaaataacccgataggacaaagtcttgcctgggactttgttagagccaattggaagacactgtattctatgtttggagagtcctctttctcttttgggaacttgattgagagggtgtcacggagattctctactgattttgaattggagcagctaatgcagttcaagaatgacaaccagaatcctggctttggaacagcatcacaggccctggaacaatccattgaaaaaaccaaagcaaacaggaactgggtaaatgagaacaaagcagcagtaaagaaatggtttgaagatgcaatactgccttaaagaagcccctgtgaaagccaaggttccaagcctgctttgcccctgttggaatggtttcatctctccaataggttctcacactgtgagccagatgccttaactcctgacatgctgcgtgtatgtgatataccttgcccagttctgccacatgctacttttgcacatacctatattcccatattcatgggcttctatgaatgaactttcactagagattgagaagctaatatactaatatacaatcagataggaaaggctttaatcaacaacagcaagaaattgactttgctatgctgctcagggtttcaattattatattttgccttaaaaaggtccatgtccagttgcaagccttcagcttctgcatatgaccactgccaacttctctaaaagtcagtagtttacagcagctggaaatcctaaatttcccttgaattgccttaaaataacatcgcacatcttttcacccccaactttcttaatttgacttatagtcgctatcccttcccattctaattaataagtagacactataactggcttaaacactcctatctacgtgaataacaaaatgccatgtatgacaataatccttaaagaggcagatatcttggaacatttatttatagttttccaaaatctttttgtatataataaagtatagacttttcatacaatgctaaattatgtacctgggaaatggaatcaaatgtccatatcttgttgttcaaaatctaagaaataaaaatggatatggagaaaagaaaaaaaaaaaaaaaaaaaa

SEQ ID NO: 455 - DNA, 1069 bp, Xenopus laevis
cggacgcgtgggtggaagttagattgtcagaagtttttttctcggtacctgggccggaattcgccgctatgtcggacaacgaggacaactttgatggagatgattttgatgatgtagaagaggatgaggggcttgatgatttggacaatgcagaagaggaggaccgggagaatgtggcaattctgccagctggggaaggtcagcaggccaaccagaaacgcatcaccaccaattacatgaccaaatacgagcgggcccgtgtgttgggaacccgtgccctgcaaatagcgatgtgcgctcctgtcatggtggaacttgaaggagaaaccgacccccttctcattgccatgaaggaactcaaagccagaaagatccctataatcatcagacgttaccttccggatggcagttatgaggattggggggtggatgaactcatcataaccgactaagaccagatgtcaatccttgacttccaaacccgatatctttgacaccagttttattctattttgtcttgctgtacagaattattctaatgtaaatgctttatttaataaaaaccaaacaagtctgctgcaaaatgcaattccattcgtaagaaaaagacatataggccatttagtggctaggaaaattggtccgacaggaaaaatgatgaagctccatgaaaagagcagaaatagtatgcacctgttgattccaaaatttttctaaacctcccccatcatctacctgttttattttttttttggtagaacaggggatccattgtatgccagtgtctctgcacctgttgctatggaaatgtccatggaggggacacctttctcaggagtatcaaaaaccaagatgaatcccactctttgtttgtccaaaaatgcgctcggctgcttttacgttcctgccacacctggggaacaagctatccctgatccaggtgctacattaccgatgaccactacctctaaatattcctcacactgatatttcatcttaacaatagaccttttaatctgacttctaataaaaacttctgactatagtaaacattaaaaaaaaaaaaaaa

SEQ ID NO: 456 - DNA, 4780 bp, Xenopus laevis
ggcttgtggattcgcttcgggtgtgaagcagagagagagaatttagttgtttagaagaacctaaagaaaaaaaaggcattatgacagctgagactcagaccctgaacttcggccctgagtggcttagggcattgtctagtggaggttctgtcatttctccacccctctccccggcgttgccaaagtacaaacttgcagattttcggtacgggcgggaagagatgttagcactttatgtaaaggacaacaaggttccatcagaccttctggacaaagagttccttcctattctgaatgatgagcccctactaccactggcacttgtttcattcactgaagaagaacagagaaacttctcaatgtctgtgaacagtgcagccgttttacgtcttactaaccgaggcagtagcggtggtggaggaactgtagtaggggttccacgaggtcggagttcctccaggggtcgaggaagaggcagaggagaaagtggtttttaccaaagaagttttgacgaggttgagagtgggtttggtcgaggagctcgcgagatgcacaggtcacagagttgggaagaaagaggagaccgtcggtttgagaaaccagcacgtaaagaaccagatggtgttcgtgggtctgcctggagagagatcccagatcgacgaaggcggtttgactacgatttacgagaaagcaaggatgagcgtgggtaccgcaggccgagaagtggttcaggcattgcagaggatgaacgggacagtttgccagagtggtgtctagatgatgcagaagatgaaacaggcacatttgactcctcaggggcattcctgtcttccaaaccttccaagaaggtgcagaaagaacccattcctgaggagcaagagatagattttcatccttctgtggatggagctgaagtctcagactcggatggtagccaaacagaagaggccaaagaaactgatcctgttcagtctcaaaatcaggatgatgatttgagtagaaatgatcacacagtgcaagctgctccttcaccagaccataaaacttcttcacccgtgcggcggacagatatgactttagacactgctcaccagaaggctgtaagtcctcatctgtcctgcaagatggatgcaaagtcacagtcaccctcatcacctcctaccccatcaaaacacaaagaagatgctgcctcggccagtcatcaagggacacgtgaaaaagctggtccatgtttacctcatcctcaatctcctgccctcagccaaaggtctcctgctagacaaccagaccctcacatagtacctgccatgtcctcagtccctgttccccagttagacactcccacagttcctatccattcatccgtttgtgctgctccaggcatggaacctgttccccctgaacctgatgaagatggattagaacacttggaacagcaggcacagcaaatggtggcatacctgcaggacgggacgctcgatgatgaccatttgcttacaaaagtgctagaccagagagtgaaggggccttcactagacaaccagcagaagtggtactacaaagatccgcaaggagagatccagggtccgtttagtaatcgagagatggccgagtggtatcaagctggatatttcccaatgactctgttgctgagaagagtgtgtgatgaaactttccagccactgggtgatatttttaaaaaatggggaagagttcccttctccacacctccaacaccaagacttggggacctggaccctgagcgtttaagtcgtcagcaagaaatcacagcactgtatcagatgcgccatctccactaccagcagttactttttcagcagcagtatgcagtcttggcgcagcaacagaaagtagctctctcttcacagcagcaacagctgcctcttcccttgcagcccctaagtatgaggatacctgagcatactgtgatcccaccagtagtaagagcattatcagtaccagaaagcacctccttgtgggagcttccacctgctcccacacaaccagcagtatgggagggtagcagcgtttgggacctcccagtggagcccacaactcagggaacaactcgagaacagctagcacagatggacaaggtgaaagctgccaagatggagcaagaaagaagggaggctgagcttagggcaaagcaggaagaggaagaacaacataggcggaaggaagcagaagaagagagaaaaaggagggaagaggaagagctggcccggcggaaacaggaggaagcactgcagaggcagaaagagcttgcattacagaagcaaatggaagaggaggagaggcaacgcaagaaagaactacagctgctagaagaaaggatgagacaggaggaagaaaggaaaaggcttgaagaggaaaggaggcggcaggaagaagagagaaggaagcagttggaggaacgcaaaagagctgaagaagagaggaggagaagggaagaggaaaagaaaagagaagaggatgaaagacgacaactggaagagattcagagaaaacaggaagaggcagctagatgggcccgtgaagaagaagaggctgtaagacttctattggaagaggcacgattaaaggcagaggaagaagaaagaaataagcgtgaggaagcacaaagacagaaggagctgcagagacagaggcagcaacagcaagaagcacttaggcgtctgcagctgcaacagcaacagcagcaactggcacaaatgaagttaccatcatcttccacatgggggcagcaggtcaccccttcggctgcttctcagtcagcactttcactggcagaaatacaaaaactagaagaggaacgggaacggcagaaactacaagagcagcggcaccagcagcaggaactaaaagcgttgcaacaacagcagcagcagcaacagcaaaaaatacctggctgggggaccatgagcaaacctactggcaccacaaaatctctcttggagatccaacaagaagaagcaggacagatgcagaaaaatcatcaacagcctgggcggaaccgacccgctaatatatctttgcctgtggcacctgtagtaaataatcacattagcagccctactgttggcaattctggaagctcagtatggggatctttaaataacaacttaagtcctcagtggtcatctgactccatgagcagcatctggggtagcacagatgttaagggttccagtgtcggtttctgggatgatgcagtgaaagaagttgctccccgaaatgctaccagcaagaataagaacaatgccagcaaatcagcaggatccaacagccgacaaagcaagaaagtagagcaggaagagaagttgctcagactgttccaaggtgcaaacaagtgccaggatgatttcacccagtggtgtgaaaagacaatgcatgcaatcaatacggcacacagtctggatgtgcccacgtttgtgtcattcttgcgtgaagttgagtctccatacgaggtgcatgattatgtctgtgcctatcttggagataccccggaagcaaaggatttctcaaaacagtttatcgagcgccggacaaagcagaaaaccagtcagcaccgtcctcaacaggatgtagcctgggtcacatgccagacaagtcaagctaattctcaaccgataacactagaggccgtacaatgcgcaggacgcaagaaaaagaagcagaagatggttcgagctgatcccagtttgctaggcttttctgtgaatgcttcttcggagaggctgaacatgggagagattgaaactgcggaggattactgatcatcgtgtaggggttgggggaaccccgcccctactttcggcttctttgggagggagaaagccaaattttactccacctatcccccaacacacacactcttaaggtcttgccaatgtcatgacagagcaatctcttgcagatgccaaggcatctggagagcttcctatcccctcatattgccacattctacctgggcaacttgatggggttgttacctcagcagattaaagagtgcgttaaggggaacttaccctcctccatcacagaactactgggtctcgtttcagagacttgtacggtctgttaatttaccaccgttattaggtggagagaggaggctttttggtgggactttgaaccttcccttcactgccttgggggtttagctctttggatttagtgacagggcatgtgtagatttcagctctaccaatgcacacagtgaattgctactggagaacgtgtagacataaagctgatgggatatgcatcccatttgtcaccctccttacactgtcctgtccactttccaattcccccccacacctttttatcagctttatgattcttaagagactttggaaagtgtggcaggtgggggcagctggagacaaccactcctttggtttgtacagtttgttgcaactatgtatatagttttggtgctgtttgatgggttatagcagatattgctccccactgctttgtatatctatttatacatgatacagaaaaggtgtgggtgggaggaagcacactaacgtttacacgactcccacaccttttctgtatcatgtataaatagatatacatgatacagaaaaggtgtgggtgggaggaagcacactaacgtttacacgactcccacaccacttcaaaagttctgccccagtttgcagtgacttgggggtagcccaggcctgacctcaataaattgctggttgtattgtaaaaaaaaaaaaaaaaaaaaaaaaaaaaa

SEQ ID NO: 457 - DNA, 1944 bp, Xenopus laevis
tgattttcagtgattggctgaccagggcgatgctgcttgcctagcgtttaattatggaagtgtccacgccagagatattgataccgggccgtagctcttcgcctacactcgttatccgtcctacggcggaagctgacagaggagagctggtagtgtgtgctctgtgtctgtccagccccggaaagtacacgtgtccacggtgcaatagtccttactgcagtctcgcctgttacaggggtccgaggcaccagacatgttcggaagatttctacaaggagtcggtgctgcagatgctgcgggaagagcaggcgggggccagagacaagcggcaggtggaggagatgctgctgaaactgagagaacaagaggttgtcggagacgataacgtgggcctggatggagtgggcagtttgggggaagaggaggccagtctgtggaacagtctcaccccgagggaaaagaaggaattccacaggttgttacagagtggggacatcggagctctggttccaaagtggaagccatggtgggaggtggaggacagaaccaaaatgaacaaatctgtttctataaccgaacttccggaggtttcagtaaacaggaagaaacatgaaagccctgcagaaccaggaatctgccacaagaagccagatggacattctgaaaatgtaaatctagaagacccagtgaacgagaaccagggagcagcgagggatcccaaactgtcctctggtacaacaagaaattcaaagggaaaagacagcacagagtcaagcagtgttccaggggggcacaaagaagagcacacagcagatcagcttccagaaaacaaagagaatggtcctgggattcaggaagacaattccgaacaaagcagcgccttaaggggataccccgaagcagacaggcagcaaagactttctaacgtgccaccacctctaaaatcgatcccagctttgtgttcgctaagtcgaaatccttctcccctaatacagtacagtttggtgaatgttgtttatggatatgccttctctcttctaaggcataatggagatatttgtgatgatgacatgctgctggatttcactgaaacccttctgggagtctctagtgctcttacttcagttattgtgtatcattcaacagcacatgggttacagagcgcagttcgtgctgcctctgacccgctgtatggagggtacgagggaggagcatgtgctgccatagaagctacggctcacatcctgctgggtgaaagaaacaaagagtatacactggctgccctcgccgacttaactcgagtactggggagagcatgcaagctagttgctgaaaatgatgagctaaggagggcgacctttaatgccaagaagaagtgtttgttcctagcagcatgggtgaatgagaatgaggagcgattgcccactttgtacaaggaaactttggcagaacatcgacagcatctacaatatattaatgggatggcagagatatcacaggggttgcaaaagacctggggtggcaagagaccaccagaaaaaaagtccttaatacaagaaattgacaaaaatgaaacataatctgttgcatttggaatactgaggataaaaaaaaaaaatatatatatatatatatatatatatatatatatattatttttgtattaaatatagaccaaatcataaaatggcttactgtgtcattgaattaaaatatataaatatataaaataagttgtttgcaatttttgctttaccagtacatggatattctgatgaatggaaccctatttagcactataaatagtatctactacgtctatgcagtcttctatggtttgggaagattagtttcccaaaacagttgggttaaaaggggacctgtcacccagacgtaaaaagctgtataataaatgtccttttcaattgaaaaaaaaaaaaaaaa

SEQ ID NO: 458 - DNA, 3311 bp, Xenopus laevis
ggaggtctgtgccggaccctgatgcagcattgggatcaccctagcccgggtgcagcatcggttacatgctcttgggcacctgcgggtgctggcgagcgcttctggagactgaggggacatgagcggctctacggctgtggcgcttctcttctgtgtgctgagctgcagcgtatggggagctgggagcaaagcctcgcacgagcacaatgcagcagccgcggctcaagatgttactttgaaagtacaagtgagtgatgttagtactcaccagcccatcgccgatgcggttatagagatattcgccaatcaagtttctgctgcctctggaactacaggagctgatggaacagctttagtcaagcttcagtataaattgggcagccaacttattgtaacagccaccaaacaagcctatgtgccaaattctgcaccttggagacctctgagattgcctgttttttcctcactaagccttggtttattgccagagcgttctgccacgcttatggtatacgatgacattgtgcagatagtctcaggatttcaaggatcaaggttacagcctcgagttcactttcagagaagggcattgaacctgccaggaaacgccacttataaggaccttgctgctttccttacagctgctagcacaccctgggaaattgacagttttccgtatctgcaaggatcagatggcaactctacaggaaataacagcaggtttgacctcaccccagttactgctgtcagcttccatttgctcaacagtgatgggacggacatccctgtgaatggtcctatttatgtgactgtccctctgcctacgcacagcagtttgaaacacaatgcacacgtccctgcgtggaggtttgatcaaaagcatggaacctggttgaagagcagtattggcatcatccagcaagagggcagccagcttacgtggacttacattgcaccacagatgggctactgggttgcagccatgtctccatcccacccagatccagtggtgacacaggacatcactagctatcacaccattttccttctggcaatattaggaggcattgcttttatactactagtcctcctgtgcatcttgctgtattactgcaggaggaagtgtctgaagccacgtcaacatcacaggaagcttcagctttccacagcactggattgttccaaaaaggatcaggccacttctatgtcccacattaatttaattagtccaatccacatggagatgctgtcttctagtggtgaagccgatatgcataccccgatgctaaagccttcatacaatacctcacgggatttcggctccagagaagagctgctttcacatcaggaagaaaagagcagaatgtctttggataatttgactccaagcggaacgttgagacaggtgtacaataaatcgttggatcatatcctaatgaaatctaggaagtcagcagaaatatcagaggaatatacatctaccatgaaagatgagtaccggaggagttacaattcagtcatctgtcagcctttgtttgaaagcaaggacaaagaccttttgtcatctactaaccatgttacggcaggaagtaagccaaatattcaggaacaaatgcacccagtgccttctgctcctgaaccagagcagttgatagaccgacggtctaatgaatgtatgatgtcaaggtcagtagatcaccttgaacggccaacctctttttctcggcctggtcagctgatttgttacaattccgttgaccaagtcaatgatagcgtttacagaaatgtgttgcccaccttggttattcccgctcactatgtgaagttgcctggagaacatccctttgtcagccagcagttgattgtctctgctgaacaacagtttgaaattgagagacttcaggcagaactctcccatgctcagcagatgcaaccgccgccattaagcgctcaagcgatatcgcagcaacacctgcaagatggagagggcgttgagtggagtacccaaaacgcaatgatgtctgaatctgtctctattccagcttctctgaatgatgcagctattgcccagatgaatggggaagtgcagctcctgaccgaaaaagcattgatggagcttggcggaggcagacctatgccccatccacgagcctggtttgtatcattagatggccgctcaaatgcacacattcgacattcatacattgatctccaaagagctggtaaaaatgggagcaatgatgctagcttggattcaggtgtggacatgaatgaaccaaaattgggaagaaaattgagaggagagaaattatccatgctgcattcatctatgcagcatccgactttacaggagcaccagcagctgaaccaagtgaatgtttcagacagtactgcttatactcagcttgtttacctggaagacatggaccaaagtcctagtgaatgtggtacagctgtctgtagccccgaggacagtagaccattcatcgaggcacctgcaaaaaagagcggtagccaaacacccagccttcaggaagagactattaagcgaaccacggaatcctcaccattgccgttaagtagcccggagcacgagtttaacataaacgatgatagtggcgaagaccaaggagagaataaaaaaagtccttggcaaaaaagagaagagaggccactcttggccttcaacaagaaatgagttgtactttcaccttgccggtggagtaggaaaatttgccaaatattcttctttcttggaaatgcttacctgtctgcaagaaaattaaatctgcattcaattcggaccttttcgccaacgaatgtttgaaaaacataggaaggaaatttctggacttttttgaccagtaaagggacatgccaccaaattgggccccagtgatttttatgccctataggacaataccctgctagggtcctgaccactaccctcctagtgtcaggagcacaggagactgaattgtaccatggtaatgtttactgcaagtgacatgctatacgaggagctcacaccatgtgtcatgaagtacacataactgaaaaggctatgcattgctgctttcacccgaagtggcattctgcctaggcattgctttttatgttaagatttttttaattattattatgtggctgtacaaacgtacctttttttttattgtaatctgcttttattggttttctttttagttttgctttattcccaatttttgtaatgtatttctacaagaaagctgtgagtagcaaattcttttgatttaaggtttgttttccatttttcttaaaaaaaaaaaaaa

SEQ ID NO: 459 - DNA, 1863 bp, Xenopus laevis
actgcacacagaacaccatggcaaacaataaggagaaggcagacacccagatgaaccaatggaaggagactcgggggtctcagaaaccaaatgtgctgaccacaggagcgggtcaccccgtgggagataagctgaatctcttgaccgtcggcccccggggaccactgttagttcaagatgtggtgttcactgacgagatggcacactttgacagagagaggattccagaaagagtagtccatgccaaaggagcaggtgcttttggctattttgaggtcactcatgacatcacacagtactgcaaggccaaagtgtttgagaaggttgggaagagaactccagttgcagcccgattctccactgtcgcgggagaagccggatctcctgacacaatcagggaccctcgagggtttgcagtgaagatgtacacagaggatgggaactgggacctgacgggtaacaacacccctatcttcttcatccgcgatgccatattattcccgtcctttgtccactctcaggagaggaacccccagactcatatgaaggacccaaatatggtgtgggatttctggaccctgcgcccggagtctctccaccaggtctccttcctgttttcagaccgtggcattccagacgggcaccggcacatgaacggctatggctcccacactttcaagctggtcagctgcaaggatgaagctgtatactgtaaatttcatttcaagactgaccaagggatccggaaccttacagtggaaagagcagagcaactggctgccagcgaccctgactatggcattcgtgacctgtatgaggccattgctgctgggaactacccctcctggactctctatatccaaaccatgacattccagcaagcagagaaattcccattcaatccatttgatgtaaccaaagtctggccacatggagattatcctctcatacctgtgggcaaaatggtgctgagccaaaacccaaaaaactactttgctgaagtagagcagttggcctttgacccaagtaacatgccccctgggattgaaccgagcccagataagatgctgcaggggagactgttttcctatcctgacacccacagacatcgcctgggaacaaattacctccagctgcccatcaactgcccctacaaggtgcgtgtggctaactaccagcgggacgggcccatgtgcttcactgataaccagggcggagcccctaattattatcccaacagtttctctgcaccagagcagcagcctcagtttaaggagcacaaattccgagtttcagcggatgttgaccgttacaacagcgccgtcgatgacaacgtcacccaggtgcgggatttttacctgaatgtgctaaatgaagaagagcgccagcggctatgtgagaaccttgccgggcacctgaaggagtgccagcttttcattcagaagagagctgtgaaaaatttcagtgacgtccaccttgactatggctcccgtattcaggctctactggacaagcacaatgccaagtgtacaaagaaggaatgtgccagacccaatacccagcattcatcttacctgacctccaaagagaagtccaacctgtagcctctcgttctcatcttctgcccagatgcttttcacttagaagattcttcgttgatactgttgtttttttttctaccgtttcatttaacttttcgcatgggcttaaatctcgttgtgtccttttctgtttcattccgatttatttctgttaaagtcgctctgggcaacttcccaggggcaattaaaggcacattactgacaaaaaaaaaaaaaaaaaaaaaaaaaaaagaaaaaaaaaaaaaaaaaaaaaaaaaaaaaa

SEQ ID NO: 460 - DNA, 1111 bp, Xenopus laevis
gttcttggggcgggagaggcagttctggtgcgcgctcgcgcgggcccagcagaaaatggcggcgggtctgtgtaagagccagcaatgttccatcgagaggcgcggttttcgtcaggaacttgactcgtggcggcacaagcttattcactgtgttttgagagcattttagaagggctgtttggacctggattattggaagatatcagcctatataaagactgtgaaccagaaggtgtatgtgattggtcctttgatgaaaactgccttttctgctgcttgagaagagaaaaagtcaaggaacatttggctgatttgaataagccagtgactgatgtggggccagaaaatttacttaagcaagaaaagttgagaattattcggctagaaaaacaagctgaagaattcatcaatgctgtcttttacaagaaagatactcctagggttttggaccccagtattcctttagttgctcgtgagatcatgcagcgaatgattcgacaatttgctgccgaatatacctcaaaaaatagctgtactcaggactccagccagcccaacagcacaaataaccaaagcttgcagactccatcacctggacaaacctctcctccccctgcaactactcagaacccagtgctaagcaagcttctgatggctgaccaagattctccactggaccttactgtaaaaaggtccctttctgaagatgcttgtgagcaagaagatggcgtgctggacctatccactaagaaaagccctcattctggaagcacggctttaagcacttctccaagtacctcaaatgctattgggaatgggtacggcacctgctatagagaatgctcgggacctggataacgtatctttacaaatgacagatgggaaaagaatacttgtcgaatgttctgagctatacaaaacagatgtaatactgccacgatggttacaaaatgttctaccttgagaaaaaatggaaaaataaaatacagaccttcttcttgttccaaaaaaaaaaaaaaaaaaaaaaaaaaaaaaaaaaaaaaaaaaaaaaaaaaaaaaaaaaaaaaaaaaaaaaaaaaaaaaaaaaaaaaaaaaaaaaaaaaaaaaaaaa

SEQ ID NO: 461 - DNA, 967 bp, Xenopus laevis
caagtttagttgccgggaggagaaggatttattgtgctacaatgaactttttgcggcaggggatcagatccgctgcttccgctgtccagagcaggagcggctgccagttgtacagtagcgtggcgggagggtgtgagcgcacactcgttgccgtgaagccggatggggtacagaggagactggtgggagaaatcatcaagcgctttgagcagcgtggcttcacactagtgggactaaaactactccaggcctcggagggaatactagcagaacattaccatgacctgcgcagaaagcctttctacccggctcttctgcgatacatggccgctggacccgtggtagccatggtctgggagggacacaacgtggtacagacctctcgtgcgatggtcggagatactgactcttcccaggccaaacccggcactatccgtggggacctcagtgtacatataagcaggaacgtgattcatgccagtgactcggtggaaggggccgagcgggagatcagcctgtggtttcacagtggggagctgatcagctgggagacctctgaccaaagtcacttgttccagggttgatgctgctgtgagtccccccaccagtgcaaagaatcctgctgggggggcggccaagccttttgtaacttcaatataggaaggagtgttattaacctattttttgtacctatgtttactaatgaatccagtcccgtgccaagaatctactctcaggattaagaactttatttaatagtttaacaacggtgctaccacggagcatgtagaggaattaccccctgctgtatacttacttcagacgactggctgcttcccgtcctatccaccagacaatattgtattgcacacttaatgtttctttttgatccaatgccagctcttcatttaggcataataaagtgatgtttgtactgaaggcaaaaaaaaaaaaaaaaaaaaaaaaa

SEQ ID NO: 462 - DNA, 1510 bp, Xenopus laevis
cccagacatcctgtcagacgccactgctctcaccgaacactgaacatgaattcccaggtacttgtctcccgtccgctggccccacagtcggtccccgcggtgagcctgccggtgcagtcagctcaggtggcgcagaacacgggcccgcactcctcctccggtctggccactgccggcttccgtacagccaagtacctgcatgaggaatggcagcagggcaacctcaccaccttctaccaggcgttctcggaccgggaccagtcggagaaggggagacacgagtccaagcagctggtagcggagactgaggcccgggcccagcgttcccaggcggactgtaccaagagcctgggggagaggctgctggatattcacttctggaagtcggagttgtcccgagagatccgggatgtgggggcagagacgcagctgctggtgcaacagaaggtcaggctggagagagccctggatgccaccgacattcccttcaccatcgccaccgataacctgaagtgccgggacaggaggcggggctccgagctggtcagggatgacgtagagatgcaacttctcaaggaggtggacctgatccgaaatgttcaagaacttctgaaaaggaccttggatcaagcagcccagcagataaggcagaatcgagatgctaaggaagccctagagatggactattcggataaggcggaagcctatgagtttgatgacaaatgtggaagatataacaatcagagcactgacatccagtttcacctcaactcctctaaatacgaagacaacacttccacaccagagtcttgggctcagtatactcatgaaaacatctataaagccgaaagagagagaatggcatccattaacctccgttcactgatagacagcattctacaagacatcagtgaagatttacaagctcagtttgacgccattgccgtagactttgaaaagcgctgcagggagttggaagatgcgaagcagaagctggagatgcacctgaaaaagactctggaagaaatcggaggccaggagaagaatattgctgctctaaagcaggccattaatgataagtctcctccgctgaaggttgctcagaccaggctgcatgagagatcatacagacctaatgtggagctctgcagggaccatgtgcagataagactagtgagcgaagtgggagaactgacggattccttcgatgctctcaagttgaaactggaagaatctgaacaatctttgagaaatctggaagatactagaatgtcccttgaaaaagatatcgccaacaaggccaacagcatctttattgacagagagaagtgcatgacacaccgaacccgttacccccatggaatgaagctccttggctaccagtagatgcctcggaaatgtacatgagcaagaatgcatcatattccatagaagattgattctctgtgcaaaattgtttgaaattaataaatattacaatgagatgaaaaaaaaaaaaaaaaaaaaaaaa

SEQ ID NO: 463 - DNA, 1579 bp, Xenopus laevis
ctgacaggaaagtctgttgtgccacagcgctagtgagaacctacagtgcaatgcaggacaagaggcagagagcgcgggtgcagggaggttgggcaggagctgccggaccggcaaatcgaccagcgatgccctcggctcagagaccccagacgtggggcaaagaacagcccccccaagagaaacattttgtctacgagaaacccccagaggtgctgcgcagagttcaggaacccaaagtgatcgatgccgctggaacccatgagattagtgtgtctccctctggggtttccaggctgcgcttgttcccctcctttattgacccccgagaagccgattggatgtttgagcagctgcagcgggagatcccctggagacagaaaaccaatgtcggcccagatggatcttaccatgaaccccgtctgacttgctggtatggggaggtgccgtatacttactctcactctacgatgcaagcgaacccccattggcacccgctactcaacatgctgaaagaccgcatcgaggaggtgacggggtacaacttcaactctctgctctgcaacctctacagacacgacaaggacagcatagactggcacagcgacgacgagccggccctgggcacgaaccccatcattgcctccctcagttttggggagacccgcaacttccagatgagaaagaagccgccccctgaggagcgcggggattacacatacgtggagcgtgtgcatgtgccgctggatcacgggaccctgttgctgatggagggggccacacaggaagactggcagcaccgagtccccaaagaatatcacgacaggagaccccggattaacctgacttttcgtaccatgtacccccaaccgccagctcccagtcactgaaatctgcccaatcactgacgagatggtggaacgagacggcgcatctcccgtcattatataaggaaaccggtgcttgtggattcgtgtgaatggctggggggggatccccttttctgacggataatctgcgccttttcctacagttataagcgctgatccgactctcaggagcagattagagaaataaattctgtttagaagtgaaataaccgggtgttggtggatgaggaaagccggaccggatcagtccagatcccccttaaatcctgtttctgttctttatgttcattctaagatgattacaccctggcaggtgacagttgggttggccatacatgggcccaaaagagctgccatctcagcggcttattgaccctggaatggggccgtatgttttggttgatggtttagaaacagtggggctcgtttgtcaacactgggcaagtttgtccatggcaaccaatcaaattgctgcattcattgttttatttgcagctggctttaaaaagctaatcactgattggttgctataggtaactgtccatgggcaggtttgcccagtgttgatagatgagccccagtgagttaaatatattgggttctatatattgatttgtttatttaaagacataacctgccagatacaaataaatatgttggcactgccaaaaaaaaaaaaaaaaaaaaaaaaa

SEQ ID NO: 464 - DNA, 1228 bp, Xenopus laevis
gtttgtgagcgtgaagcgagtgcaagttctgatccctcatggctgacgggctgattctcagggctattcgaggcaaagccaagacgttaaatctgaacggaaagaggctgcagcgggtccctgtagcggtgggctgccttattagcctgaccgagctgcagctaaagaacaacttgctctgccggctccccgtggaactgagcgccctctgcaggctaagagtgttacatttaggaaacaaccactttgagaaagttccagaagaaataaagtatctaaaatgtttagaaaggcttcatctctttggaaataggatctctgagataccggcagctgcgcttgatggcttggacaatctgttatttctaaatctgaacaacaatttgctggagcaccttcccagagagatatacaagctacagagtttggagacattgagtattaacaataaccatatgaaggccattccaaaggaactgtgttttctacaaaacctacaggaactccacctggcaaacaatcagctggactctttacctgacgagttgtcttacttaactaatctgaaggagttacgtctgtcaagaaaccagctaactggccttccagaaggtatttgcaaactgataaagctcaaaattcttgatgtggcaggaaattttattcggtcttttccatctgcgatgcacagggttcctctgacggaactgtactgtgaagaaaatccgctgctagagaaacagccggtgtttgctagacaacaagaggaaatattgactctgaaggaaataactgctaggctgatattgaaccatctgcgcagcagaaactcattcttcatagaacaaatccagcaacatccagaagcaagatcagtcctctcaagtagaaacatctgtgctttgtgcggaacgtggtttctagacatgtggctcgaatgtgtaacatttgtggatgtgaaaaaaaaaatgaagacttcaagtaatcttcagcttctgccagtcagagtgttattgtgctcttacagatgtttcaaccaaaaacaagctggtatctttggagttgcagtacaataagttgcagatgattgagttttggtatttgtaaatagtgactgtagtgccagtgtaatgtaagtgtgtgctagcatttgttgttgtcatatctttactgtaattaaaatgttcttttcagaaaaaaaaaaaaaaaaaaaaaaaaaaaaaaaaaa

SEQ ID NO: 465 - DNA, 1439 bp, Xenopus laevis
gcggggcgggcggcgctggttgttgggtacagtcctgtcttctctgcagccacagccatgtccacaggaatgcaacaactttacacagagatgtgctctgaacaaaagcagcctgttaaccccttcattgctgaaatactttctcaaacagaagagcaagaactatatgcttccaccttaaagctctgtggaaataatcgtctggtgcaagtgcagagagtcagtgatgaggatttccttgctctcactcgggtcttgagtaaaaactgtttcataacaaatcttgacctgcggtacaacaatctcactgacaatggagcagctcacatcgctacatttctgcagaataattcatcgctactttgtttgaatattatgggaaatgatataggaacagatggtgcagagcgcattactaaggcattgcataggaattcaagccttctgagcctcaggatgactggtaacaaaattggaaacaaaggaggaatgctatttgcttcaatgttgcaagtaaactcatcccttgaagaactggaccttggagactgtgatttgggtatacagagcttgatagcactggccacagtactattgcaaaataaaacactaaagtctgtcaatctaaaccgccctctattctatgtcatacaggaagacactacagttcacctctctgagatgttacgagtcaacagtactctgcaggaattgcacctctccaagcatgaaatgactgattttggtgtgcaacgattgtgtgatgctttgcatgaaaactatgcactaaaacatcttgatcttagctgcaataaaataacacgggatggtgtcaagtgtttggcagaagttctgaaaagaaacaaaaccttggaaatcttagaccttgcttcaaaccgaatggaggatgatggggcgatttaccttgctgaagccatttatctgtacaacagaagtcttaaagcgttgtcagttgtgagtaacaacatacgtggaaaaggactcaaagctttggcagcagcaattaacgcaaataattgcctactgtacatctacatctggggaaataaaatcgatgaagaagcaagtgtggcattttcccatctcctgaagtctggtcgtctcagttcttcatctacagatgttcaaccatatgttgttgatggacgtgcctgccttgcagagctttttcatggccttaaaaaacattattactggacaccgagctatggaatggctgatgatcctatcagcaactctcagtttgcaataagagatgacgattcatttttaagcactaaataaaacaaataatatgcaaaatataagaacctgactgtggtagctcacttctgctttgtatagtgttttcaaagacttaaatacaagcgacttttatatctttaaacaaaaaaaaaaaaaaaaaaaaaaaaaaaaaa

SEQ ID NO: 466 - DNA, 791 bp, Xenopus laevis
ggttcgttcacgtgtcctggtcgccccacactataagaataagtggctggaaagttactgagttcaggggagaggaggacttggtatcttatagaacgtagtgataccggcgactacaagtaatttaccaagttcctgctggcaaaaaactcgcagtcatggcaaatggagccgctcccgaaagtcagcaagacactctaccagaaatagtcgccgctgtcaatttcctctctagtcttctgcaaactcgactgaacgaacaacaactgaggggcttcggaagaacattacggaacaccctaactgaacactacacacatcattggtttccagacaagccagcaaaaggctctgggtatcgttgtatcaggataaaccataagatggatccagtcatcagtaaagttgcaagtcatatcaacttgagtaaccagcatctgctcagtctattgccaaaagagctcacactttgggtggacccttttgaagtttcataccgaattggagaggacggttcaatttgtgtcttgtatgaagcctctgccccatctacaaggggccatttgaactgcaaaagtgaggtgctggggagttccagcactcctacccactacctaatgacagtgaccagttaaccttctgggatttgccccccccatctgctgcttgtgtatgtgtaaataccttgctctgtgagccatcttttttaacaaagatctatttattttttaaagcgttttttgggaaaaagtaaaaatttgtttaaacagtctaaaaaaaaaaaaaaaaaa

SEQ ID NO: 467 - DNA, 1882 bp, Xenopus laevis
ccagtaactatagttgctcctcacgcagcatggcgcgccgtccacgtaacagcagagcctggcgttttgttcttagtggtgtgcgaagggatcaggatggccgctctccagccttacatgcagaggaagaagcatgggggtatgactctgatgggcagcacagcaacagtgactctgacacagacctgctgaccttgccaccctccatccccagtgctgtacctgtgacgggagagtcgtactgtgattgtgacagtcagaatgatccctattgctccagcctgcaccccttccgtcagatcaagagctgccagtgcggagaggaagacaactactttgactgggtgtgggatgattgcagtaaatccacagctaccgtgctgagttgtgacgatcgtaaggtcagtttccacatggaatacagctgcgggacggcggctatacgaggcaacaaaatgctcactgagggacagcacttctgggagatcaagatgacatccccagtctatggcacagatatgatggtcggcattgggacttcagatgtaaacctagataaatatcgtcacacattttgcagtcttttgggcaaagatgcagagagctggggactctcttacacaggacttctccagcacaaaggtgacaaaagcaacttctcctcacgctttggccaaggctccatcattggagtacacctggacacgtggcacggagtgttaacattctataaaaacaggaagcgcattggtgttgctgccacacaactgaggaacaaaaagctcttccctttggtttgttcaacagcagctaagagcagtatgaaggtgattcgctcctgctgctgcagaacctcactccagtacctctgctgcgcccgtctgcgccagctgcttccaggctccgtggactctctggaggtccttccccttcctcctggtctcaaacaagtgctgagtaataagctgggatgggtcctgcaaatgggttcaaatcgatccagccaacacaaaggcgacggctcagcgaccacctcctgtgggagctactctgacagcagctgcacccccggacacgacaactgtcagcgcaagcgatgtcgcaggatttaagcgagaagcagggagtactgtcacgacgttctctccgtctcgccgaacatctcactgtgaacattttcatggacaaaagaaagttgaatcctttgtacctcattacctgggagtcaaatcaagacaatggaaaaacagttaatgggttgccatttcactgatttgctattcttggaatgactaagattaatggtgcttaagtatttctggttacccaaagtatggtcccagctgacgatttaagaggcgaccgtcaagtaataacgattgtgatgcacagaactgacactcattttgaactgtagggcaagcaacggttcccttttgtggtttgcctacaaaccattaaactgacaactcaaaacgggtggaattgttcttggaggactgaactaagcaaacatacatgtgaataatacctgatggaatcactgaaacggatttcaagtacccaccacggtttttattttgttcaacagttatcctttgatgtgcttcatttgcgcccagctccatagaggaaacctgcatcaagcctctgtcttgcaacaatgtaatggaatgtattcttaatagaactgtactataggggaaactggcttggacacagcccattggtggggaataaccctcctttatagcatggtgtaggagcctatgccacttatgcatatttatgtacatgcattaaccccacaagatactgtgcttatgctccattcaataaaggatcggttcattctctaaaaaaaaaaaaaaaaaaaaaaaaa

SEQ ID NO: 468 - DNA, 828 bp, Xenopus laevis
ggaaactaaagaaggggaaataagtctttgatggcggggcagcagcagcagcaacagtccagctcagcgtcggggggagcccaggacaacgacattttcgacaaatacacgtgccccatctgcctggaactcttcaagactcctgtcagaatggtgtgcggacacgtattctgtgcatcgtgtctgcgtcggtgcacgtatgacaaaacctctatgtgcgccgtgtgccggggaaagctaaaaacggagtcctgcgcctacgatttgacaacacaaatggaaaacattgaggcatcatgcaaaggctgcaataaaaaaatgaagctttcaaagatgcgagagcacttggccgcctgttcaaaatatgaaaaatatgtcatgaatggaattaagtctgtcaaaatgggccaatctcaggaagttggtgatatcccaaaccgctttaccttcacctgcccctactgccaggaacagaacctcgctcgggaagggttagtggatcactgcaggaggtttcacttgacagatgcaacgcctgtggtttgcccaatctgtgcctccatgccatggggagatccaggttacaggagtgccaacttcatagagcacattaatcgtagacatcgcttctcctacgacacttttgtggattacagcgcagacgaggaagcaatgataaatgaagcattggtacggtctgtttcagaaaactgagccttctcggcttccgcagctgagatcggatgcagaaattcccgcgaccaccgttgcgccaacttggaaatagactttccaacaacttaaaaaaaaaaaaaaaaaaaaaaaaaa

SEQ ID NO: 469 - DNA, 733 bp, Xenopus laevis
accagaggagggtgggagagtgaccagaggaggaagagtcgctttcacaagtcacaggcaacaggaagaataacaagttcccctttaagcagaatcagagagacagacgcccagccatggacaggaggccggatatgggaggggtcccagcagcccctgaccgggtgagggatctccagagtgaggtggagggagtaaagaatatcatgtcccaaaatgtggacagaattctggctcggggagagaatctggatcatctgaggaataaaacagaagacctggaagcgagctctgaacacttcaagaccacttcccaaaaggttgcccgcaagtactggtggaaaaatgcaaagatgattgccataatctgtgtggtggttggtatcattgtactcctcatcatcctcctcgccactggagtcatccccacataaatattgtagctagccaaacaggctgttcagccaatgaggactcacgattacctttcacttcctcctgcctgatgatcctcaagccaatggagagatgccagtcagactcattattatccttcggatgcctctgatcagctagattcaatttttccttgtgtgttggcttgttccactggggtcagcgtaacacattttctagaatttattgtacattttctttctacacataaaggtttaattctgattctgtcaaataaaaatatttaggtttaaaaaaaaaaaaaaaaaaaaaaaaa

SEQ ID NO: 470 - DNA, 1237 bp, Xenopus laevis
acggctcgtctctagccatgcgttcagctatggtttctcgcacggtgtatgaattctctgctcggctcctcgccaatggggagaacgcggctctgtcccagtaccggggccgagtgcttctcattgagaatgtggcatcgctctgaggcacaactatccgggattatacccagatgagcaagctgcagagcacgtatggctcccgcgggctgcaggtcctcgccttcccctgtaaccagttcggacaccaggagaacagcaacaaccaagaaattctgaaccttctgaagtatgtccgtcccgggggtggctttgaaccaaacttccccctctttgagaaggtcgatgttaatggagaaaaggagcatcctctctttactttcctgaaggagcaacttccatatcccagcgacgactccatttccctcatgcaggatcccaagagtatcatctggtctcctgtgcgtaggaatgacattgcgtggaactttgagaagttccttatcactaagaatggggtcccgtacaagcgatatggccgtcgcttcgagacagtcaacatccagcaagacatagagaagctgcttcatgaaaattgtgcatagtcagtctactcaacagagtcccgggtttcactgtccttgtttgttcttggtgtaaaatcacttgcatgtatagccactgctctgccactgctcaactacaaccttctacacgttgaacaatgaccacaccattcacttccatggaaaaaaaagttgcatggccttgtgtcagatgcttcattgatatgtttctaacagttctattttttttcctttgagcaaaacttgtagagcaacatctgatgctccatccaccgcatacaaggaccctgtgtatacccggacagctctgatgcactgactgttgtgtcagatctttatgtcccatcctagtgaggtttgctacctgaccctccccaaaccctctttgttccctgtactggctactaaccctcaggctattacttatgatgatctgccttgaaacctagagaggcagagctgatgtactcctgtaagtgcctgagggcaggtgttggtaaatggagcctggagattggatggagggtccctatgttaaaattgtcataagaaaataaagtttattaaactattttgacaggaaaaaaaaaaaaaaaaaaaaaaaaaaaaaaaaaaaaaaaaaaaaaaaaaaaaaaaaaaaaaaaaaaaaa

SEQ ID NO: 471 - DNA, 2035 bp, Xenopus laevis
cttctcttgtttatattttcattcggcttctcttttttttttttaagaaaaaaaaatctcgtcaaatacctgttttattgatttgcagagatggccaacctgtgccctcccccatctcctgcagtcgctaaaacattaattagtattgatggctactctcctctcttggctgctacttttgcatactgggacaatattctgggaccaagagtgaggcatatatggtccccaaagtctgatcatgtgttactcagtgatggggagattaccttcctcgccaaccatacgctaaatggcgagattttacgtaacgctgaaagtggtgccattgatgtcaagttctttgtgctgtcggagaaaggagttataattgtatcgcttatctttgatgggaactggaatggtgatagaagcacgtatggactatccataatcttaccgcagtctgagctgggattttaccttcctctgcacaaggtctgcgtggctcgtctcacacacatcatcagaaaaggacggatatggatgcacaaaggccagagtataactcatatgttgactggagaagttatccccataatggaactactttcttcaataaagtcgcatggtgtcccagaagagattgatatcacttcaactgtacttaatgatgatgacattggcgacagttgtcatggtggtttcctcagcaatgctatcagttcacacatgcagacctgtggctgctctgtggtggtaggcagcagtgcagagaaagtaaacaagatggtgaggacactgtgtctctttctgtctccaacagaaaggaaatgttccagattatgtcgctctgaatcttctttccagtatgaatctggcctctttgtgcaaggactgctaaaggatgcaacaggaagttttgtgcttccattccgccaggttatgtatgcgccttatcccaccactcacattgatgtggatatattcaccgtgaagcaaatgcctccatgtcacgaacacacttataatcaaaggcgctatatgagagcagagctgggtgctttgtggaaagctacttcagatgaggagattggaatggattcagtcattcacagtgatgagactttcacacctaatctaaatatatttcaagatatcctgcacagagacacatttgtgaaaaactttttagagcaggtcttccaattgaaaccaaacttatccttgcgaagcacatttctggcacagtttttgctcgtgcttcacagaaaggctctaaccttgatcaaatacattgaggatgacacacaaaaaggcaagaaaccattcaaatctctgcgtagcctgaaaacagacctggacctagcagcagagggcgatctttacataatcatggccttggctgaaaagattaagccagggcttcattcgttcatttttggcaggccgtttcacacaagcatgcaagagagagatgtactgatgacattttaataccgaaatgacaacatttctatgctcagcccccaccatcacttgtttatttggattcagaattgcttggtcttgtttctacgtgaagcgtttcctctgtaacagtaagtgaaatggaaataggcagctgtccaacctccatctctctgtgtattatcagtgaatacacagcatgttttgttaatatcaaatctaaacgactgagcatctttctgcatgaccagcctccaagtgatcatactgtatgtctctgcactggatcagatgtgatcacccacaactgaacttgtagataccaagtgaccaacctttgtgtgaagtcattttccaagtcagtctgtataatacaggcagctaaaattaatcactggccaaaaaaacagcagtgtaatagaaaccatgcttggtcagccagtaagatgcacatatgctttataattaatatatgctatttataatgtaataagtaatgataatactgctatgatgtactgtaaatttattatgactaataaaacaaaggtgtgattgtgtaaaaaaaaaaaaaaaaaaaaaaaaa

SEQ ID NO: 472 - DNA, 1873 bp, Xenopus laevis
gtgagggagagatctcacataagagtgactggcacagcgagaatcaacatcagtcacgcagtgccggctccaagctgcgggtgccctgtaatgttctgaaagtggcagcagagttacaagctcttcgcagggggaggactatgaggaaatagtcaacttggaagacgaagtgttcaatcccaatatgacttcatttaagcacgaaaatgtggaggacctctacgaattgctggagaagttgggcagcggtcattttggcgtggtgaagaaatgcaggcaaaaaagcactgggacctatttcgccggcaagtttataaagacacggaaatgtaaaggcagccgcctgggtctcgaccgggaccagattgaaagggaggtgtttatcctgcagcagctggaacaccccaacatcatgaggcttcatgacgtcttcgcaagcaaagctgaaatggtgctgatcttagaactgatccgaggtggagagctctttgacttcatagctgagaaggaagccctgtcagaagaggatgccatagagttcttggagcagatactgaaaggagtgacctacatgcacacctgcaacattgctcacttggacctgaagcctgaaaacattatgctgcaagagaaggatgtgccccatcccaagatcaagatcatagactttggcttggctcagaagattgaagatggagctgtatttaaaagcctgtgtgggacaccccaatatatagctcctgaggtcataaactacgagccacttggtcccccaactgacatgtggagtattggagttatcacatatatcttgcttagcggattgtcaccctttcaaggtgagacagaccaagagacattgacgaatgtggtgtccgggaactatgaattcgatgaccgcatcttcaaacagaccagcgagttggccaaagacttcatacagcagctattgctgaaggatccaagggaccgaatgaccgcagtagagtgtctgatccacccatggattaagccactaaacagaaagcaagctgtgaacagaagccgctcatctatcaacatgaagaattttaagaaatttaatgctagacggaagtggaagctttcctacaacatggtatctgcctgtaacagactatgtcgcatgaagctgctgtgcaacccaatgaaggatgaagaagaactgaggcagtgtgaaagtgaccaagaggacgaaaaaaccaaacccgtaacacttttacgcaggcgcttgagcagctgttcttgaccagactctgtaatctccatccacaagcatgtgccgtccttttccttatgtcggcagacaaggagtccagaggaagtccctcaaagatgggttgcatggagaaaccacgaagactgaagatgcattgctactaaagagatccaagtggggcaggtgacaagctccttacaccccactaaacctgacaacttgcacgtgactcctttaggttaactcaatgcaaaataccggtttgtcgcatggctttaccctatcagtcggaggaatccagcaaacctctatgatttcatcaacagcagaaaaccaaacccgcctgagtccggacaggaatatatgaccgagtgcttttactttatcacaatgacattatatattatcatgtgacaattgcatgttttcagacccttcaggggaaaccagtattcctccctcataaagagattattttattaatgacgttaacctcctcctgttttttttcccctgagtttttatgattattttatttctgctgaaacaagtggttttataatccattatttttgtgaaacttgcattttctcttattcacagtaaaaatttacattttttaaaaaaaaaaaaaaa

SEQ ID NO: 473 - DNA, 1598 bp, Xenopus laevis
atcgaattccccgggcattgatttgactggtcaataaggataaacaaccgagattcacaacctgaataatatcacaatgttaccaggtgcatgatgcatcagcagaggaggaagaaaagatgaggcacaggtccagttctgctagtttggcctgatcaaaaacgtgataagagaaaggatgttacatatgttgctaagcaaatatggagagaaaacctagtgtctgcagaaaaagtggcagttggaattgcctacttgtgctctttctattgctactgttcacagtggtttcagttaacttccttctgtatatgtatattgaccaaatgtatgcaccatctcgattcagccattctgaagtgaacctgtgtccttatggacactttaagatagcaacaataaaaaactgctctccgtggctgacttgtgagaccattaaaaaagaagtcagaaagctaaaacttgttggtgaaggagcagttaaaaaggtatttttgtctgagtggaaaggcttgaaagttgcactttcagaattaaaatcgctagatctgcaggatgatttcctccacggattaaggatgctgcaatcaatgcaaagcagatatgttgtggttcttgttggatattgtaaagagacatttagcatactgactgaatatcacccccttggctctctgaaagacttggatgaaacatttagctttcctaaataccaaggcttcaacacatggcaaaatcgccttaaacttgcaatcgagtatgtgagcatcattaattatcttcacaatagtccccatggcaccttgatcatgtgtgattccaatgatctggacaaggcactgtctcaatacatgctgacaagtgactttcatgtggtagctaatgatctggatgctttgcctgtagtggacaaggaaaagggcatcttggtcaagtgtggccaaagggaaataactggacattttgttgcccctgaacagctatggccatatgggccaaatattgaattttcagatgacttaatgccttcatatgatgagaaaaccgatatttggaagattccagcagtgattgatcaccttttgggtcatgtgaaaggaagtgacattgttaggttccatctgtttgacatccactctgagtgtggtaaagctaacccatctgaaaggccttctgctcaaatggtattagacacctacagaaaagtcctggctttgttgatgaaagagatggcagtggcagaaactcgagagatgttgtaaaataatatttgaacgcactgatttgtttcatgtgttttctacagttggagcacaaaagaaattatatactactatactacagggcattcttacaaattagtattaactttttctttgattgactaattctccaatagacaagtgttgctttaaactaatgcaatgcttcttttactgtatacaataggaaataattgggtttcaccaatgttccatctaattctttctttgctgtgtgtgcatattttttacttgtatgtgcatttttaaaaactgtgctcagctcagaataaatactatatgttgtgttttcacacacaaaaaaaaaaaaaaaaa

SEQ ID NO: 474 - DNA, 3339 bp, Xenopus laevis
cctaactccaccgactgctgtgctcataggcgctcttacaaacattaggggggctttaatttctctgttgtaccctggactctctgactagatcagacttttcttcttttttagtttgtattcccatgccgagatgaatttatctttatttttcctctctttagggtggaggatattgtatgcacaggacacaatcttcacaatcaataatgtctcgctaagtgcaaatccatctgccaccttggaaaatggaaacaacatgagtgtgacgtgttctgtggaaatctccaagttggagacaaaatcatttgagctgaaccatcagtttttatttttcaaggatagccagcatgtctataacgtcacctctaacagccgaagtgcaatttataatctcagtccagcaagggtgtacaaatctgggacatactcttgtgacgtgattgtgaaaggcaaaaagaagtccagtaataaactgatcatagacattgcagggctgtcaaaacctacagtgagtgtttctaccaattccacaaaggaagggcaaagcataaaagtgacatgtgaggcaccagagggggaggagccgcccttccgcttcaccttctacaaaatcaagacaaatgttaatacaaaagaggtgatccccatgcaaactacatggaaaaaatctgattccattgaaattcatatagaggagggagataaaatagtgacgtttcagtgtaatgttgaattcatgattattccaaagtcaaaagtctctgatttcagtgatgggaaaatagtttctgtggaagaacagttttcaactccaaggattgaagttttgccatcagtcaattttactgaaggggaaaacataacggttaagtgctcaatccagacatcatccactgtttctggaaaggtggaactttttattcagaagggcacatttattttaaatagctccacaacagatactgtatcatatgtccaactggctacaaataaccatactggccaatacatctgcaaggcagaatatgagcagacatccaaagccaacagcgccaacgtcattgtgaaagagctctttaaaacacctcagcttgtttcaaatgttaagaactccattatcaataaaggtgcgatgttgactctaaattgcaaagttcctgggatgccacccccatcaaaccataccttctaccagctaaaggatggcaaaatctacagcaaattgcagagactcaccaaacttgtaagtgaaaccgacagcgccatttatagctgtatggtcacagcatccagcatcactaaaaatagtgatcccctgaacatccgtgtctatgcccctgtttccaaaccagttctgacccatcgtaaccagagtatcagcatggcggtgcagggcagcactattgatctcaggtgcaagtgtgacaagggaactctgcctataacctattccttactgaaagactcaaaggttctgcaaaccgctactgcaacacaggacaaagcagccgtgtttcaactctttataagtgagcagcagaattctgggcaatatcagtgcagagcttataacttgtatgatggacccgctatgtacagcaacatcgtcagcatcactgtcatacgtcctatcaaggaggtcacactaatggctgtctcagcccagtcgggcatggtggaagaaggcaaagacctttacctggagtgtgcagttacaagtgggagtttgcccatcgacttccacttctttgttaaaaaaggaaaggaaattctcttccacaactcaacggctaattcctcattcaccgtttctacacacattgagtctttcagcgcccatgatgatggcagctacttctgtagagccaccaacggagcccatcagactgtggacagtgagcatatatatgtaaaagctgttctcgctacctggaagaaggggctcattgtcacttttgttgtgttgattcttgtggctgcaatggccatttgctactatttctgcatggaaacaaagaaaaaaggaggagaaacagctctggaggtgaagaggacaactaatgaaaacagttccaacaaagaaaagtcgtctgctgcagacatcaaacaagaagaagaatcctgtttggttccaggaaacgtccaatcagatgatgaaaatcatgttgataaatcaccagaaggaaacttggggaacaataaagagaagcaagaggtggagagctcagaggtagagctggtgacccctaagccacatcaagatggcagtgaaggcaacatccctagaacagaagactcacctgtagatgcctaaatactttggtgcactgaatgaagagagaccctaacagagagagagagaagcagagactaccattgctttattggggcttatttaaggaacatacccagccaaacccaaatcatctcagcctctctcctgtgtcgctcccatatcatccaggccaagatcctcctgactcctctgcaaataccccacaaaagattccattacagctacagcagcagtggtgcagtatcaaacaccccctacttattactccctcccacatagtaaacaatgcacggaaagcttcaacatgacaggctgctggtgcctttatctcaacaccacatgtttttacctctgtgttggaaaagcaagtcctccctgcaagttttatttcaacctgccaccaggagaaaaccttcagttggaatggggtgcaacagcttccttgtgtgccaattgctgtgctatttatatgtgaacgagacaagcaccctacatgctacttggtgaattcatggagcagcactatatggtaaccttcatgtttctaacagccatgtcccctgcattgtgcagaagcagccatactgaacatacttgcctcaatgtattaaatggaactgagctcatttgttcattaccaacttaaccaaggtaatatttattggcaggcattattacatctgtacctttaaccgcttcccagctgctgtaccgtgagtattgtgcattgtccaatgtatgcactgccactaggcaactaaatgcagaaaacttcaaggcagtgatccagatgccccagcaaagggaagctgaaaaaaatgctgccataaagtaggttgagacatttataccttgtagagcaggtaatggaaactcccctttcccttgtgtgacactgctgtaaagcaatgctcagttcaattgctttcactggactggctgataccattcattgctccttctctaaagggaatgagtcgtactgcttctgtgctcagcttgtaaataaacatctcccatcttgaaaaaaaaaaaaaaaa

SEQ ID NO: 475 - DNA, 2827 bp, Xenopus laevis
ccgtgctgatttgctgcagtgaagactgcagcgtctcctgcctgccctccccccccccactcgttctgcttacagcatcagtctgtagcaagtgcatgcgagcagcagtgatagctcacctattcatgctttggaatgccagagcggtaatactcagcctcacaacacagcagcactccgactccacagccacaagatgcaggccagcgccgattcaacccggatggaatgtctctggagcaactggaaatgccaggcaattgacttattatattggcgagatatcaagcaaactggaattgtctttggaagtgtcctactgatgctcttctctttgatacagttcagtgttgtcagtgtcatggcatacttagcacttgctgctctctcagccacaatcagcttcagaatttacaaatcagtcttacaagctgtacagaaaactgacgagggacatcctttcaagagctacttggatatggaaatttctctgtctcaagaacaaatccagaagtacacagactgccttcaagtatacacaaacagcattgcaaaggagttgagaagacttttcctagtacaggatctggtggattcactgaaatttgctgttctaatgtggttactgacatacgttggagctctcttcaatggactcacacttcttatcatggcggtggtgtccatgttttctctcccagttgtatatgacaagtatcaggcacagattgatcagtacctgggacttgtgcggacaaatatgaacaccattatgaccaagatccaggctaaaatcccaggaacaaaacagaaagaataaggtggactggggataattcaagtgttggtaaattattcaagtctaatgtggaaacagccgtgttgctacacttccgatttaacgcaccattctttttaacacaccgtgttcccagaaacatccagaaaaaaagcaaagcagctctcggagacctgcttctctgctgttagatatacttgcaatcagctgtgtcagacactcaagtatagtgaagagattcaaaagtgtactagttgtgttcttcttgtgttgctataaaatgcatgacattggaagcctatgtaagattttatttcccacccttttttagtgtttttctgcttctctctgcagcgcttctataaattaatgtgatatgtggctagggcttcatgcttaggacaatgacgcaatagtacaaatttgcttctttgtctctgggccgctggttggatttatctcaattatatatatatatatatacgtagaactgtagactctaatgtttcgtgttttccagcacaaaagtgaaaacagtgtacggtacctctatccgttttgtatgactaaacttgcagtactcatgttttaagggattgggagccagatatacagtacatgtatggtatgtagagagcgtccgcttgttcaatttattacgatttgtattactttctctgtagttcctagtgaacttctggactgaatatttgcacttactatgtacttgacactgaatgcctaaataaatgttactaaatgtatacggttctctttttgttgagcttgtaaaaatattgcaattctaagaggtaaacatcctagtgtcgcccaaactctgagattgagacaagtatcgattacttgactgtaaaaaaaaaaatgtccctttttcactggcacagataacatatttactgtatctttctgctggcagtatcgtacctcacctactgtttcaatacaaatgggaataaagtgaaataattgccaatgtgttgttctctatgtactcattcactgcatgtgtctactaggccatttggtttgatagaaccatggcccactttaaagtggacctgtcacccagacacaaaaagctgtataataaaagtccttttcaaattaaacatgaaatccaatttctattttttattaaagcattcatagctgttgtaagcacatttaaacatctcagctgtcaatcaaatattgtctgcccctcctctatgccwtgggcatagaggcggggcagacaattactttcactttccattcagcacttcctagaaatcrctgctctccccacatttccccgttctcttcactgtttaattgtgtarccagggcatggggatggacatcaggtctccattctggcgcacaaacaagattctgagctgatrcaaggcttgtcttaataacagtgtccacaaaatggctcctgcctgtttgttataattatgaattcccagactgaaggaaacaagattcaaacaatttatattgcgtaattaaagttcattttgcttgactgatgtgataaaataggattatgaataatttttttgggtgacgggtcccctttaagtagtaaaaaaaaaatgtcaaagtgccctttaggtacaaaacaactacagtaaaacctcaattttaagtacccttattttaatagggtgtatttgcctgattttaagtaatgttttcccggattttacatcaaaatgttgtccctggatgttaccaaaaaaaactggccttttttttccccctctaatgaaaggtttttatattyggtgaaaaataaaaaaggggttttaaatttttcctaaccccaaaaaggggaaatttttttggcccaccggggggtttccccccccccccgtaaaaaaagggggaggcaaccttttccccaccaaatataaagaaaacgcgggcggccccccccccttttttattaaaaaaataaataaacttcttggtgttgtgcgcccccgtataaacaataacgctttaattcactcttta

SEQ ID NO: 476 - DNA, 1766 bp, Xenopus laevis
cccacgcgtccgctttggctgcttgcatagcatggctctcaccggctggctctgaagtgctaggaaggctggagcggaggagctttatttgcagctgctctcacaggtagttgctaaagaagtcccctatggcgtgtaatcagagctgtgaatactcaggcaattatgaagccactctattcccagttatctacggcctggttttcgtgtttggccttattggcaacttggcagctattggtgttattgtccaacatgtgaagcgtggcaatgttctaggcatctatctggctaacctctgtgcttcagacttaatgtacatttccacactacctgtttggattgcttatacagcgaaggaagattggctttttgggcctttgtcttgtaagattgtgggcttcttcttcaatgccaacctctacacaacaatttattttctcagctgtatagccatggatcgttttgtggctacagtgttccctttccaggccaggtccctaagaactatgaaaagtgcactgataatatgtgcttgtgtttggctgatcatcctgggcactcactctatattccttggcagagatgaactgtttcgctccagccaaaacgtacaactttgctacgaaaaataccccatggaccagtggatggctcgtatcaattatttccgtatatttgtagtcttcctcatacccctggtgcttttaattgtattctactgctctgtagttagagtggttcatcggagtacaagcttagagaaggagcagaagcagaagattattggcctcctaatgacaatgatggcaatctttatcatctgctacctcccttatcatgtggtgctctttattcgctcttatatcagtgataaaaacatgtgcacatgctctctggaagaaaaagtccgtccagcttatcgtatctcttttagcttgaccagcctcagcagtgccttggatccatttattaatatcttcattagtgacagcatcaggcaggatctacttaaggaaattagggcagtgtgggcaggttttagaattttacgtcaccctcgagattctttaagaaggaggtcatcaaaaaggacaggatataacacagtgtcccacaacatagaaaatgacaatcttttgattgaccaaaaaagggaagaaacggttttgtgaacatactgacaaaaaaatgtgagtcctctgcaaattagtaaatgttccatgttggccacttaattcccctcccccttgtttctgaaaaggctttgtaggtaccgcacattggcctttccctcaactgtgaaatccttcattataagatctcgttttaactgtgcattttttttttttttaaataaaaaaaaacaaaacatcacacttttaaaggaagaacagataaaacagttgtacaatgactttcctccttttatttttcacaaaggtataaagccaagacattgcttgtagacctctgctaatgtgtagttgttttcattgaactcatgatatctgtgcagggtacatacggttttctccctaatatctgcattttctgtacaataaaatacattttattaaatgatttagaaaaccatgtacagaggtgggaacttttacccagtgtgagaggatgtcacctactcatgcatgaacattactttctgtaccctaaagcatgcattccttccatgaaccatatagccaaactgagcagacaaacaatgtgtaggctttcagaaagctatttataaaaaaaaaaaaaaa

SEQ ID NO: 477 - DNA, 1254 bp, Xenopus laevis
ggggagtaccatagtagcagagcaatcctgtactgaaccatgtcctgggctgtcctcctcctctctctcacctctctctgtacatattcggctgcccaagtctctataactcaaccagtatctgaatcagtgaaattgggagagacagtgagaatctcctgcacactcagtggtgccagtatcggtgatctccatatgtgctggtaccagcagaaagcagggaatcgccccagatacttgttacgtttctattcagactcaagcaaacaccagggagatggggtacctgatcggttctctggatccaaagattcccctaataatgttggctatttaaccattaaaggagccttactagaagatgatgcagattattactgtgctacgtggcatgccagctcgtttatattcggtggtggaacccagctgaccgtcctcacaggtgacgtgaaagccccttcagtgtccatctttgctccctccgaggaagaaatagccaccaaaaaggcaacagtggtctgcagtctgagtgatttcacccccagaggtgccacagtgaagtggctggtggatgggaaagaaaagactgacagtgttcagtcctcagggctcagcaaacagagtgacaacctgtatatggagagcagttatctgtccctgactgcagatcaatggctcaaacatgaaacctattcctgcaaagtctcccatcagggcaaggaaataatccagacgctgaaaagatcagactgttcataactctccaacaacccaccactgtctattcctttttgccactttttatccataaagggaacttattgcatataaaagaacttgtgcatgtgtaataaaattatagtcctaagtgtttctaaccattcagtaattgatgtgattttagtcaaacaacatgagaacatctacatttattgaacagcaagatttatatggaaatgccagttccttttaaacctgtgaagcgctgcagaagtttgaaatgaaaaattaagttgatatacactttggtgttatgttttagaacatgtgattcagcaatgtactaattttgttccttgatcttctgtattcacttctttatttcagtagaattatgcttcttaaagcaatgctttacattttaatgtcacagtgttaggaccctcctgttctacttgtaactcttatgtctatattaatccttcaataaaaaatctgtttaccaaaaaaaaaaaaaaaaaaaaaaaaaaaaaa

SEQ ID NO: 478 - DNA, 1582 bp, Xenopus laevis
gcttgacagagatggcgggcagtgcaggagaatggtgcctgatggagagcgaccccggcgtgttcaccgaactgatcaaagggtttggatgccgaggtattcaagtagaagaaatctggagtctggaacaagaacactttgtagacttgcaaccagtgcaaggattaatctttctcttcaagtggcagccaggagaggaaccagctggctctgttgttcaagactccaggctggacacaatcttttttgcgaaacaggtaataaacaatgcatgtgcaacacaagcaatcatcagtattttgctaaacaccacacacaatgatgtacatttaggagaaactctgtctgaattcaaagaattcacccaaagctttgatgcagctatgaaaggactggctctaagcaattccgaagtgatccgtcaagtacacaacagttttgccaggcaacaaatgtttgagtttgatgcaaaatccacaacgaaggatgatgatgcatttcactttgtcagctacgtgccagtcaacgggaggctttacgaactggacggtttaaaggatggaccaattgatttaggaccatgtaaggaagacgattggatcagtgcagctagacctgttatagagaaacgaatgcagaagtactgtgaaggtgagatacggttcaatttgatggctattgtgtcagacagaaagaagatctacgagcagaagattgcagatttgcagaggcgaattgcagaggaagagcctatggacacagaccagggcagcactctgctgagctccatgcagtcggaaatcgcaaaataccagctgcttatagaagaagagaaacaaaagatgaaaagatacaaggttgaaaatatcagaagaaaacataactaccttccattcatcatggagttgctgaagactctagcagagcatcagcagttaataccattagtagaaaaggccaaagagaaacacaacacaaggagggctcaggaagccaaatgatacccctgctactttggaaatagaacagaaaacaaagcttcttcctttttcatgacacagaacaagtggaaacaagccaccagggcttctcctatatattctatgtacagagcacagttgttttgtatgcagagttcggcatggtttaacctttgcatcacggtacattaggccttgtacatcctatatcattttacaaagtgccacgtaatgttatgagcccatttagtgaaagaaatacacactttcatatggtaatgaacactctttatgaaaaaattcaacacacgtgtcctgtggtgcagagtgattctaggcccttccactaaaggaaaaaatggggacacaaagaagctatagcatgagttcatgtttgtgtatacaacctacattgtccctgtgctctgttttaccatgctgtttccctttaagtacagtcacatttgcagacctcctgtaggaaaggtatattttgcatctttttggtctttttttgcagttgtccctgaaaatgcatctcattactcataaaattcatcaaaaacaaaaaaaaaaaaaaaaaaaaaaaaaaaaaaaaaaaa

SEQ ID NO: 479 - DNA, 2093 bp, Xenopus laevis
ccacgcgtccgcccacgcgtccggtcgtgcaggagcttcccctgtcagaactgccagacaccatactttaaggactgcccaaaatggaaaattataaacgcatgagcgacgatgagcttattgaaacgctgcagaaatgcaacattacacacgggcctattgtcggtacgactcggactttatatgaaaagaaactttatgagtatgaacgcagcaaaactaggaatcagtatcctctaggttcctacgagagcaaaacacactacagaaacagagcgaacgaagaggacttggaggatgaggatttttacgtagagaaaaccgttaccagaacctaccaatatccccaagcacgatcacgagtcacctttgatcagcttgagggagaaccactctataaagaaaacacgtaccagcccatatcccagatgcgccaaatggggacaacacagagggtggagcctcgcaggccgatccatgtgaagcagaacgaagagaaccccagcaagagatacttcccagtgtggctgcagattctcttcctgttcctgttcgttggtttcctggccgctctttacttcctgcaggaacccgacgacaatccattcatgctggagagtaactgatcaaatctgcgttagtggtgtacgatctaccagcaatacagtatgcttcaaggcagggctgtccatcttcagcctcaaaggctttaatggggcagtatccacctgtgttctacatgagctgaaaatgtagtctgcctattgggtttcactaaaaaaaaaaaaattatatatatatatcacattctaatctatactatataaaagtactttcaattctgcactgacctgcttaagaaagacgtttcttactcaaatcaattggcaaaacatatgtaaagctctattgattggcctcatgtggaacaatggtgtgttattgcgtattaaataaaatgtattgggtttgccctctactatggacaagtcagtgaatggtttaaaatagcagaggagagatttatttaaatattggcttttttttcggagttggacagcccagggtagatccctgtgtgagtgttgtagtgctcagttgtgcagatatggaatatgaatgggataagatcccatttttaatttagtttaatggaaataccccccagtgacttcaagttaacttctcctttaaacagtgcagagatcctaatggtctttcactgcctcttattactagtgatgggttaatctgtcaattttgacgcgggtgacaatttttatacgtgcgactattttgtccaaatgcattaaagtcaatgggcgtccgaataattttgacgcgtgacaatttttttattgtgaatttttgccgcagtttcacaaaaacattagtggccggcgaaaagtggaaattcgcagcaaatccatggctgcttaataaatttgcctcatcacaaaaaattggtttttttaatggaaacacggtcagattagtctcccggcaacaaatcttcttcggggtgactaatctccccgaactgccttcccgccggcttgaatgaaaatcgcattatttatatgtgctccggcctttctggggcaaaatgttacttttaaataagactaccacaggaatgcgctttacagtgaatgatataagtttttatactgtgttttagtgatcccgctcggcttccgtcctttctgaattacagctaaatgacaaacacacaaataaaaatacactttccctgtacctcactgacattttaacaggcctattgtgtaacgaagtttagtggcatcttagaacataatcacattttaatttaaatagggcacccgttgttgtcagtgcccaagtatagttatatctattctttacatagactataaagtgcaggggctgagtgtattgtgtgtctatgactgcacaatgacattttcacatgttgggggggggaatagtcttgtagtatcagggctggggcaaaatataacatgcttaggtagttggatgtattgcagggccatcttgaattgcaattgtcagggcctggtcactcttcggaaaccaaaaaaaaaaaaaaa

SEQ ID NO: 480 - DNA, 1076 bp, Xenopus laevis
ggcacgaggcctgtgtccacttggtattcatatgctatggagagatttaaaagtttatcactgcagttcggcccttgggatccttacattctgaggccccaactcagtatggattaattcttagacgtgtgtccgagtatatctacataagaaactttatctcaagagttctattgatttcagatcagcagctgtgaggggcagaagcaatttcacatcaacgtttggcttaacagaaatgctttgcagggaccatgggagattcatatgtataacgttggctctgctgaccttttattgttgcaaaggactggcattagaggcagcggaatattccaacaaagggagttcaaatgctacaaaagaggatctattgataaatcataatagaacaattgacactttctatcatttaaacaaggacaatgagaaaagaaaccagcataaaaccgaaggacttgtgcctttcattggccttacagacagcagcaaactcagcaaacattgctgcaataatggaggaacatgtgtcctgggaagtttttgtgtatgcccaaggtactttacaggacgacactgcgaatacgatgaaagagcaaaacactgcacagctaagatccaacatggtgattggatacgcaagggctgccgtttgtgtcgctgcgcatatggggttcttcattgctttgtagaaacacagactgattgtgatgaagtcgaagaggaagaaatacattccagtgcaccaatggaacaatcctcaatataccttattgcatttggcatccttttctgcatttatactttggtttaatttttatgaacttggttcgcattcaaaaacaccagagaaaacaaggctgcattatcgtagaagatcctgcatagaaaaaaatctcactgctctataagcataaatatctacattaactcttcccatggaagtaaagaaatatttattagctgtatactatttaatataacatattttataatttgtattaaaacacatgtaatttgtattaataaacatatatctatttaaaaaaaaaaaaaaaaaaaaaaaaaaaaaaaaa

SEQ ID NO: 481 - DNA, 741 bp, Xenopus laevis
atggcacacatactgtttctatcatggctggtgactcttgggacttggggacttacagctatctgtggccaaacaaatgatctccagcactataatcagacccagaaagacatggatattggttcactccgccgtcgactctcctctggtactcgtccttacagcctctccttgtctcctcaagactaccactattctcccaagcccaagcatctacgtgtttccagactacttcggctcctgggatcttcttttgaccctttctggatgtctgtggagcaacctgcagataacggcacaagtctactttctacactcagtcaggacatatatgatggtgcaagtcggtaccgcaaaaagctgtctcaggaggctcaggctttggattttgattctttacaactgccaacagagctatctgcaaactctagccagcatatccagaatgagattcggcagtggttggtgcagagggccagctgccatctcacatcatcgtgggttgaccttggaacggttttctggccaagatgggtaagacacacagactgtgatggggcaaatactgtctgctcctggccacctggcatggcatgcagacaagcacagcttacacagattaaactgctggcctggcattgctggatgaaggacactggtttgggctgggccacacagcaatgtacctggaggcaggtaccctacccagtagtggcagcatgcaagtgtacctgtaaatga

SEQ ID NO: 482 - DNA, 859 bp, Xenopus laevis
ccgggccatcattacctggcagacgttagctcgataagtggcaatggaaacggtgcgacggatcgtgaaggggactttattgctcggcttttgcactggtattggcggcgatctgtgggtgcttgtggcgcccggacaagaacggaggttggagatgcgtatgaattaccctgaagctaatccacctatgttagcagaggcgcataaacgtaatgagatggttcttaaggtaattgaagagtctgctaagacaaacgagaacatggccaggaggtccccatggagctcatgagtataaattaagttgataagcctggaaaagatctgaattccttctctgaagttgctgaagctctggatgaaggaagttgagctgacactacttttttgggaggagctaagatgtacgggtgtacaataatgttggcacctcttggattcaagcatcacgagcttgctgcctgtatagcagtatctatcatgtttgtgccctttgcaattcatttgtaactgataaatactaagaatgctgatttctttctcaatatctgtatgcattactacatttttgctcagtttttaaataaaaggtttactctttatcttatggaatttgcctattttcatgtgcatgaaagaagatggttgcaatatccaaattatttgttacatttaatgagacaatagtacttgctatacttgatcattttatagttacattttaatctataacacttggtcgaacaaattctgttgtatcaattccatggaagccgctttctgtagatcttatgacatttatatcatcactgttgtaaacttgacatgaaataaaagttcctgctcgtgaaaaaaaaaa

SEQ ID NO: 483 - DNA, 2646 bp, Xenopus laevis
cccacgcgtccgagagcaagatggcggctaatatgtaccgggtgggagattacgtctattttgagaattcttccagtaatccatatctcatccggagaatagaggaacttaataagacggcaaacgggaacgtagaagcgaaagttgtgtgtttattccgccgcagggacatttccagcagcttgaacagcctcgctgatagtaacgcacgagagtttgaggatgaatcgaagcagccaactgttggagacaccaatagacaccagttaaagcatcgggagctctttttatcccgtcagtttgaatccctaccagcaacacacatcagggggaagtgtaacgtgactctcctgaatgaaaccgacatcctaagccaatatttggagaaggaggattgttttttttattcgctggtgtttgatcccgttcagaagactttactggctgatcagggggagatccgtgttggttccaaatatcaagctgagattcctgatcagctggcagaaggagaatctgataacagaaaccagcagaagatggagatcaaagtttgggatccagagaatcccctgacagacagacaaattgaccagtttctggtggtggcaagggctgttggaacctttgcaagagctttagattgcagcagttcaattagacagccaagcttacatatgagtgctgcggcagcatctcgtgacatcacactgtttcatgccatggatacactacagaggaatggctatgaccttgcccgtgcaatgtccacactagttcctcaaggtgggccagtactctgcagggatgaaatggaggaatggtcggcatcggaggctatgctttttgaggaagcactggagaaatatggcaaggactttaatgacatccgacaagattttctcccttggaaatctcttgctagtatcgttcagttctactacatgtggaaaacgacagaccgatatatccaacagaaacggctgaaagcagctgaggctgacagcaaactgaaacaagtctacatccccacctatacaaaacccaatcccaatcaaattatttctgtgggctctaagccaggtcttaacggagcaggattccagaagggtctgacctgtgagagctgtcacaccacagtgtctgcccagtggtatgcgtggggtccccccaatatgcagtgtcgcctgtgtgcttcctgctggatttattggaagaaatacggtggtcttaaaaccccaacacagttggagggagcagcacggaacataggagaaccacattccaggggccatctttctcggccagaggctcagagcttgtccccatacactaccagtgctaaccgcgctaaactgcttgcgaaaaaccgtcagaccttcctgctgcagacgaccaagctgactcgcattgcgcggcgtacgtgtagagacattctccagcccaggagagctgcgcgccgcccttatgcccccgtcaactccaactcgatcaaagctgaatgttctgttcgccttccaaaagcagcaaagacccctctgaaaattctcccccttgtgcgcccctccttggcagctattgtgaaggaactggcggcccaagctccccttaagccgaaaaccccacgtgggacaaagaccccaataaaccggaaccagttaacacagagcagaggtctgagcgtgttacctcaaaaaagagtgtttgaagcacaggtgtctggtgtgggtgttgttcctccattctctgcaaatggccgctcgttctcatcgggtgtccgttctagcactcagtcaggtgtaaagagacagaagctcaacgttgctgatgcccctaatccagtggtgtttgtggctactaaagacacaagaagtctcaggaaaaatctgtcgcacatggagatgcgtagagctgctcgtcgccccagtctgccggtgaaattaaaggttcctctcccgccacgacctgcgaacctcctgcctgcgcttaatcccgcccaccccgccagtacaagtgagccaatcgttctggaggactgagggaccttataaacaaagtttcccttttcggggagagaatagagccctacagccctgctctctgttaccccagccaggcaataacgctgaagaacagagggacttaaatattgtaaaatcagaaagaacccaggctcctcctcctccttctgctttccagcaactgtgtccggttatggcttatttctctacagtcctttactttcctcccaagcaacttttttatttttaatatatatatttttttcatgtaactcaattgccccgccctgtttgttcatacgtcattttaacccctttttctccgatcctttttttttttaattcttgtttagtttatgctttttttgtacaagagaacaaaacctgagctgtccatcagtaaagtgaggtcattattcagctttgtgtggatgatggatttcacgtagaacgggagctttgtactacaagctttatgtggatttaataaaaggtcagaagtcataacatcattcttggtagagaggctggaaaggccttttatctggaaatcgatgtgaataaaacacaatgttcttcaaaaaaaaaaaaaaaaaaaaaaaaaaaaaaaaaaaaaaaaaaaaaa

SEQ ID NO: 484 - DNA, 3067 bp, Xenopus laevis
gctgtccggctggagccgaggagctggatatcggcggcgttgcgggacgtttaagcagcgattgcggactgtattaagaagatcggggctgtaccacgaaaaaaccgaaaatgcttactgagattccagcggtcctctccaacaacatggagctctcctctactaccaatcttggatttatccatgccttcgtggctgctatctcagtcattattgtgtcggagcttggagacaagaccttctttatagcagccataatggcaatgaggtataatcggctcattgtactggctggagccatgcttgccctgggactcatgacatgcttatcagttttgtttgggtacgccactactgttattcccagagtctatacgtattatgtgtcgactgcgttgtttgcaatattcggtctccgaatgcttcgggagggattaaagatgagcccagatgaaggccaggaagagctggaagaagttcaagcagaaatcaagagaaaagatgaagaacttcaaagaacaaaactgctaaatgggaccggggatatggaaaccggcgctgggccaacagtgcccaagaaaaggtggatgccgtgtatatccccaatttttgtccaagctttcactctgactttcttggccgagtggggagatcgctcacaactcacaaccatcgttcttgcagccagagaggatccttttggtgttgctgtggggggtacaattggccattgcttatgcactggtttagcggttattggaggtagaatgatagcacagaaaatctcggttaggactgtgacgatcatcggaggcattgtgttcctgctatttgctttctctgcactatttatcagtccagattctggattttaacgacgtcgcactgtggatggctgctcccttttgtactgtactgctgtatataatgtacaaattgtagctagaatgtagctctaactatacagaactgctcaatctcggagactatttttggagtctttatgtaaccatcttatttagtagggggattttttgtttttttaggactgtcagattttagtcattcagagaccctcctccctaacagattatgaacttgattcgtattggacttggcaatctttggaaagctgtcagtattggatataggagtaaggatgtaatgtccatactttattccatcattctttctttaagatagatgttagttaccttcatactgtgaggaaataggaacttaaacctttccgagtgttgaaacctacgaagaaatattaatctaacctgaagtagcctattccagctgttggaggactacccacccttgcacccatcttgtgctggcccgtggaagcatttaggaagatatagtcctgcaacagtacattgtctttcgctggccttgttgtattcactctgtaatgtgcaggaaaaatgatcaaaatggtgcaatttggcctcctagatgattggttgaaataagctattggacttagagcaatgaaatcacaacaaggcttcctgtgtgggtgggactgtacacccctttcctttaaatttggaatattccatagttagtcttaaggcctctttttcttcagttcaatttgaacacgcacattgatgtctacggcaggcagctcaggtggtgaaatgtttctctgcatgtgggggaccttatttattaacactggacaaatttacaccttggcagtaactcatggcaaccaattacattttttcttccaatggtccacctacagctggctgccataggtactgccatacgtatagatttgcccagtgtattataggactagagacaaattaacggtcattgtgcctttagtgagattattctgttacaatcacattcactgttctgtgaccttaaacagctgttctattcccttagtattacagaaaagtattccgctttcctaattgtattcaggggaaaaaggcttttatgtctggtttgctcctcccgggcatttattgcttcttgaaatgaacttctatggcttatactgagagtaaaggtatatgaaatgtatttgtataaaatagttattttctgtattgtttggttttgcaccaattctgcgctgatggattcttttttgggtttgtgctactgaaatgccttagggttttgtgtgtctgatgcattctcccaatgaacaagattgtttgcttgttctacaaaacaaaaccacacaacaaccttagagaggagcgggtaaaatgtagaggaggagggcagcaccatgaaggaacgcttgttactaatattttctgcattttgagttgactgatgccagctggactgagctgcagatcttagaatacttctgaagtggttagttaccctttaatccgttaaaccaaatgtctgaacgtgaagaaagatgacttattattattattataggtgagcaacttctgcatgggatgtaattgctgaaagaagacactataatgtggcaggtaaatgtatgtggatcactgaggtgacatgtctgtgtaaggaggacacatccattacttgataaaggcgcaaccagttgcattcgatttctgacttcttcctcaattttcttttttaaatatacaatggctgtagcacaggaagaaacagggttgcacaatgtcatattggggtgaccttagctttatcctcatcaatatccttttgtcacagggtttatgataacacttttttttcagtctatggaggcagctggaatggctgtaactggggtaatgtcacaaaggtcacaaagtctgtgccaggtctagtatcacaccacaaccttttggatgtttccaacaggtaatctgtaaatgcttcctgctgattgggtaccatgggttactagacctggacatgtttacattgccctttaaagtgttacaataatacgatttatgaatgaattatgtcttatagcgtgccattccaaaggctttgttaattgaagaaccgttttttgctgatactttgaggggggaaaatggttgtaaattattaaaactatttttaagtgaaaaaaaaaaaaaaa

SEQ ID NO: 485 - DNA, 2412 bp, Xenopus laevis
atcgaattccccggtgcgaggaacgtcacaggggggacgaatcgcctctaggaagccgcggcgatgcgctttgtgcattgagcagccgcagaaggcgctgtgttaaacaaacggaagacgggattcaacgaggaggccttttattctctcgcgaggaaggacgccattatcgcccacaaaacaacacgagaattcgcccccaaacggaaaatcaacgatccttatcagaaaagcctctcgtgctgcatatctctgctatacttccaatgatgtcaggccaagaactggctgaagtggttcaaatagcagtggaggatttgcattcagaccatcatccagttgagctggagaatcatgaagtgactgaggaggatttgtcacctacgctgaagcgccagcgaatcgaaatcaattgccaggatccatccattaagtcatttctgttttctatcaaccagacaatttgcttaagactagacagcattgagtccaaattgcaggtacttgaagcaacatgtaagtcattagaagaaaaactggacctcataatgaacaaacaaccaaatccaatccaagtcccaatggttgctggttcaccacttggagccacgcagacctggaataaagtacgatgtgtcgttccacagactacggtaatactgaacaatgaaagacagagcacgagtgtaactaaactggaggctcatgaagaatctataaacaggacaacagaaactcttgaaaatatgcttaatagtgcagttcctggaagaaggcacaacacaattgtagtgaaagttcctgcccctgaggacagccataatgatgatgacaatgacagtggttctgaggctagtgatacactgtcaaattgcgggaattcaagctcaaatatgggaaacaatgtcaccctgatcaccttaaattctgaagaggattatcctaatggtacctggttgggggatgaacataacgcagagatgagagttagatgtcctataacagcagccgacatgctgcacatcagtaccaactgtcgaacagcagaaaagatggcactcactttactggattatcttttccatcgagaaatccaggctgtctccaacttgtcaggccaggggaaacatggcaaaaagcaactggacccattaatgatctacggaataagatgtcatcttttcaataagtttagaattacagaatctgactggtatagaatcaagcaaagcattgattcaaaatgtcggactgcctggcgtagaaagcagagaggtcaaagtcttacggtgaaaagcttttcacgaagaacaccctcttcctcatcatataccaccacagaaggtgtacagaacacggtgtcctcatccagtgacttgcagcaaacatcacctcaggctctgcactatgctctagccaatgctcagcaggttcagatccaccagattggagaggatggacaagtccaagtggggcatctccacattgctcaggtgccacaaggagagcaagtgcagatcacacaggacagcgagggtaatctgcagattcatcaggtccacgttggtcaggatggacaggtgcttcagggagcccaactgatagcggtagcctctgctgatccaactactggtgtggtcgatgggtcaccacttcaagccaatgatattcaagtccagtatgttcagcttgccccagttgcagaatcatcagcaacagcccaggcagtggaacctcttcaaactgctctccagccagaaatgcatattgaacatggggctatccagattcaatagtttgaaccgaccagagatcggggaaattccggaaactgaccagtagagttgggttggcatagagtcaacatgttttgcagcttgcggcatgaataatgtgatcagtaaataaccactgcttaaaatgtgcgtaggatatcaggtaacctgacctttccatggctacttaatagaataaagaatattcactacctggtgacaatttgtatggtaagaaaggttttcagtttcgcactgaaatctcaatggagcaaatgaaaggaaattctttaactggtttgtatgcaataaaatgctatttttgtatcctctgtattgtttatatccaaaagatgaaataacattgctatcatatatggaaatgttcttcattatctgcaaaattcactttttgtgtttgtttttagtttccttccctagattttcccagagttttgagatcaaacctattgtaagacagaggcctagtatgttatttaaagtgtaacagccctaaattgtgaatattttgcaattaatattagctttgaagtaatctgtaatctgctgccaatgctttgactgacaaaaggtaaaataaaaattgtagtgaacaattaaaaaaaaaaaaaaaaaa

SEQ ID NO: 486 - DNA, 2403 bp, Xenopus laevis
atcgaattccccgggcggagacatttaggcttctgcggtgcatcctgggtaataacggaaccgagtgcagtgatttagtctcccgcctgagctgctcctggactctgagagggtgatcatgtccggatggaacagtctcagcgccagagagaagatggtgctgacagtgggtgtctccgccggtgccgtggctctctatgtctgttacagcaagtaccgtgacaggagttgggagaagcgcggcccccagagagaccacataagccccagtacgtctccagcacccaggttgtgtgtgttggatggggaaatctatgagctccacatgaaggtcccatcagattctgtaaagctgctcattgggaaagagggcaacatccggaagcgggtccgaaagcagacagacgcacatatacaggtgaaagagatcccaggctccacggggaaacacgaggtgacactcataggcacacaaaaacaggtcttccatgcccaggaaatggttaacagagccctgcaagagagcaccatcttgcaagtggaactgatgtttccctcaaggtgcatgggacgcatcatagggcaaggaggtgaaagaatacgtgccattacccgcaacactggagccaaaattgaatgtgagccaagaaccaatgaaagcaaaatgtcacccacccggcgcatcacggtgacagggaccaaagaacaagtggaggctgccacgttccatattcagaaggtgtctgaggaagagcagagtattcagcaaagagcggcagaatcttctgcatttcggtgtcggcggaaagacgtcattgccgttaagaaagaggcgaagcagcctgtggtgcaggagacaaatagctatactcagggcagtagggtgcaggaagagaagagagagggtgcagcgttaataggggagagtctgcttcgggtgaaccaacccagcaaggagaatgttgcagacaccacctatgaagtgaccaggtttgaagttcccagccccgactacccattccgagcagatgagtacgttgatgtttacgtgtcggctgtggagaaccctgaacacttctggattcagatcttgggctcccggtcgactcagctggacaaactgacctcagagatgacggaacactaccaaaataaaaagggaggcatgactgaaatccaggtgggtggcattgtggcagccccgttccgctcagataatttttggtacagagcgaaagtcctggggttcctggagaatggaaacgtggatttgtactttgtggattatggagataactgggaaactgggcaagacaacctcttccctcttcggcacgacttcctgagccttccattccaggcaatagagtgtggcctctctaaaatctctcctaatggcgctacatggacggaggaggccctggtttactttgaagacctgacacattgtgccctgtggaaacctctaatggccaagatctccagcttcccctctccaggtgtctcgtgcttccaggtcctgctctttgactcatccactgaccctgtaacggacatcaggcagaagttaatagttgatgggtttgcggtggaaagtaaggagagtccccagcgagaggatgaagagggatcattggtggctcggctgctggatgaagtgaccagtctctccctagaaccggaaaccatcagtttttcaagtcgactggatgatcctcagccctcagatggttcaatagaactaatgagagctgatccagagccaaaagcagcagccaccttgggtcacaagccaaaagtgacgtccactcccgtatgttgcccaagagctgaagaagagcaggagggaagcctggaggagagcattgccaaaattactattggtgacagcgaaggctcattagaatcgggaattacagagacggcctctgagaatggcaccacctcatatgagggctcctctaagtgctccaaagactcctccatcgacttaactggttctttcacctctgaggaacagagctcttcccaactagaagacagcagcatatactccccccggggctgcttctactacctgactgacgagcccacctccagctccatcttctacagctcctcctgcgacgccattaccataagctctgagagtgaggaggaggccgggctggataaaggaccgaccaataagaagaagactaagaatggggctggtacgaggttgagctctctgtcaccgactccccgcagagcaccggcagtgaagacgatgtgattttggtggaagactgacccccatatttggcagagaaccagccaccatttcattttgcactatataaagttcctgtttctgtatatatttgtctgttaataaaagttctaaaaaaaaaaaaaaaaaaa

SEQ ID NO: 487 - DNA, 1085 bp, Xenopus laevis
atcgaattccccggggggggtatgattaaccacagtaagacaggatctcttaatgcagagctgtgaatgacactggcaacaaggatttggtataataccaagatggccatttcacagtttcgacttttcaagatctgcacttgcattgcttccgtgctagccttcttcaagagattaatatgcaggtctgggagaggcaggaagctaagtggggatcaaataactttaccaactgcagtggattattcctctgtgcctaaacaggtggaagagtggagctcatgggatgacgaagcccccaccagtgttaagattgaaggtggcgtggagcagttggaaccagattacttcaaggatatggcaccaaatatcaggaaaacccaaaaaattgttataaagaagagggagcctgccaactttggaaacatggatttcgctgatggcagtattgcattttccagcagactggcagcaacacaggacattccattcattcatcagtccgcagaactgggagatttagaaacctggcaagaaacttctaatgcttgggaggaagaaggcgatgcaacctggcaagctgaggaggtgctaaggcagcagaagatggctgaaagggaaaaacgaatggctgagcagcagaggaagaaaatggaaaaagatgcccagagactaatgaaaaaggagcaaactaaaatgggagtcaagttatcctaacgagtattttgctacagagagtgcagagactgatgcatcgtttcacaggcttcaggacatttgtagcagatgccatagggaatcctggaaaaaaaaaagaaaactttctttttaaaaaattaaaatttttggggtttctttcgagaagcggtgctgggatttccgggtgcggtgaccctttaagttatttttcagatactggggcagttacatcatgacaaattcgcctccagggactaagcgcacagagaattctaaacttcagaaataaaagggtggaaataattcagtggtggacaatctgctgctctatttatgctttcaagaaatatggaattaataaagaattttaaaaaaaaaaaaaaaaa

SEQ ID NO: 488 - DNA, 1608 bp, Xenopus laevis
atcgaattccccgggctcggaaaatctgctgttgcaggggcgatttgaatgcagtaactgacaggacttgctggtttctggttagactgatcctgtaactgactcgatctccagaatggatgaaacggattcacagattacgtgtgctgattcttctgtggataaactgtctcatttaaagagaaacgaggttaaatcctgccctctgcctgaattacatggggcagatgaaatgctgccagagctcaacaagagctgtctcactaacccagacatattgagatacagcaggcaacttgttttgccagatttgggtgttcaaggtcaactaaagctttcaaaagcctctgtgttggtcataggatgtggagggctaggctgtcctgtagcacagtacttggcagcatctggaataggtcgtttggggttgctggattatgatgtggttgaaatgagtaatcttcatcgacaagttctgcatggtgaaaacaggctaggaatgtccaaatctgtgtctgtcgcaaaaacacttaggaagttgaactccgctgtggtctatcttccttatcacatcagtttaaaccctgaaaatgctctgcagattattcaacaatatgacatcatcgcagattgttcggataatgttccaacaagatatttggtcaatgacacttgtgtgttggctggaaaaccacttgtatctgccagtgctcttaggtgggaagggcagctcacagtgtataattatcaccaaggtccatgttacagatgcttatttccaaagcctcctccttccgaaactgttacaaactgcgcagatggtggtgtccttggcatagtacctggaataatcggttccttgcaagctttagaagtattgaagattgcttctggaatggctccatcctatagtggtgttttgttgatgtttgatgcactggaaggacgtttcagaaatatcaagattcgtgggaagaagaacgattgtgcagcttgtagtaatccttcagaaactgctattcttcaagattatgaggcattctgtggttcatctgcttcagataagtgcagaatgttgcgtttgctgtccagggatgaaagactttcagtagaggaatataaaagacttctggatgaccacgttcctcatatacttatggatgttcggccacaacctgaagttgatatttgtcggctaccacattctatccatatacctttaaaaggtctggaagagaaaaatgaaaaatgggtcagtttcctcaggacaaaaatcgctgaattaataactgcaggaaacagaacagaaaaaacagtgataacaatttgcaaactgggaaatgattcccagatagctgtgaaaatactgcaagatttatttggaaaggaagatttgttcatagcgaaagatgttcaaggtggactaatggcttgggctgagaatattgacccaatgttccctcgctattaaattttaactcataaatgattcattttagaatccaagggtaaatgtgcatgtttattttaatgtcatatcttgtaatgtcagtgattgcaaatttaattaaacacttgcatgaaaactaaaaaaaaaaaaaaaaaaaa

SEQ ID NO: 489 - DNA, 2234 bp, Xenopus laevis
ctgaaagctggatgtgttgttagtgtcctggctcctgaggggaagtagcgtgtagaccctgtgcctggtgaatgtatggacttcttgctgggggaagagtcattcccaccgctgaggtatttcaaaggtaaaactgcaccaatgaaagagaataaagagaattctagcccttccactgcccctgcaagcctggaccatgtaaagccatgctggtattgggataagaaagacctagcccatactccatcacagctggaggggcttgatcctgctacagaggcaagataccggagagaaggggccaggttcatatttgatgttggaacccgactagggctacattatgatactctagcaactggaatcatttattttcaccggttctacatgttccattccttcaaacaatttcccagatatgtgactggtgcttgctgtctttttctggctggtaaagttgaagaaacacccaagaaatgtaaggatattatcaaaactgcccgtagcttactaaatgatgtacagtttggccagtttggggatgatcctaaggaggaagtcatggtccttgagcgaattcttcttcagacaataaagtttgatctccaagttgagcacccttaccagtttcttcttcgatatgcaaaacaattaaaaggtgacaagaacaaaatacagaaattggttcaaatggcatggacctttgtaaatgacagcttgtgcaccacactatctctgcagtgggagccagaaatcatagctgtagcggttatgtatcttgctggaaggctgtgcaagtttgagatacaggagtggacatcaaagccactttacagaagatggtgggaacagtttgttcaagatgtgccggttgatgtgcttgaagacatttgccatcaaatccttgacttgtattctcaaggaaagcaacagatgcctcatcatggagctccgcaaacctccccccaggttcaggcacaaatagcttcagtgcagcctcaacaacaatcccaaaatgcagatccccaaacagctcctcaaaaagaacaacaacaacagcagcagcccccatcccaacagtccaagaagccatctcctcagtcaagccctccaaagccagtgaagcgacctttgcctgcttcacctaaagatgatagtaaaccagtagaaccactacctaaaatatcgaaagttgagacctcacatcctcctttacctcctgttcttcctccaccagagagaaaacctctggtcccaagtattgctgtgagtgaaggggatcctgcaggtggtttagaaccagcagaacatacaaagatccagattcctcctccagcccatcctggccctgttcaccagcctccacctatacctcatcggccacctcctcctccaccagctagctatattacggggatgtctacaaccaattcatacatgtctggagagggttaccagagtttacagtccatgatgaagactgaagggccatcttatggaagtcttcctccaaattatgggccccctgctcatttgccatatcatcctcatgtttttccacctaatcctccacccactgtaccaccgccaccacctccttcttcattcccacctcctaacattcctcctcctacacctgtctatccaccacctccaacatacaaccctaatttcccacctcctagactgccacccactcatgcagttcccagtcatccccctccaggaattgcaatgccaccaacctcctatcctcctcctgctgtgcccccgggtgggcagcctcctgttgtacctcctccaattccacctcctgggatgccaccagttgcagggctgggccgtgctgcttggatgagataaccacgctttcttgccgtcatatatcaaaggttttcattgtagggggagaatttgaagtcctgtttatttttttttatttttttgctcattgtgggcatcatcagaagcgctagttgatacccagttaaagtagcttcccaaaagtaaaagaacctgtagctgctatattttcctttccactacaagcaagtgtttaatctcttgaaactgttagcctaacatctttagcttactggaatttgtacaagttaatggggagtgaccatgaaaaactcattttaatataaactttatcgtatggacactcctaaatcttatcaataaagtttttttctaatataaagtaaaaaaaaaaaaaaaaaaaaaaaaaa

SEQ ID NO: 490 - DNA, 1646 bp, Xenopus laevis
gccaagcaaaagatagagagggaagaggaagagagagacgtgtctcgtgctgctgagtgagaatggctggaaggcagcacagcttctgaaagcagaaacatccagccctgaaaagacataattcagtggaatatattgggaagcagaccaggataaaggaagaatgactgaaagagagcgcctggaaaaatggagagagcagatgggaaaggagctggatagggtaatggggttttggacacagcattcaatggacaaggattatggtggtttcttcacatgtctggctcaggatggagctgtttatgatgacctcaagtacatctggctgcaaggacgacaggtttggatgtactgccgcctttataggaaagtgcccagatttcatcagcaggagatacttagtgctgctatagcaggtggtgagtttctattgtcttatgcttgccccagtgctcattctctgaaatgtgcctttgtggtgacaaggaatgggcaagcagtgaaaattcagcgcaccatctttagtgagtgtttctatgttatggccatggatgaactctggagaactacacacgaggagcggtacaagaaagcagcacatgagatgatggttcagattgttcattgggtgcgagtggatccatcaggtttggggagagtagagttgcctggcgctgctcaagtaaatgccatggcagtgccaatgatgctactgaacttggtgagtcaactgtgtgagggggatgaagagatggccaaaaaatatgaagaagtaggaacatggagtgtgaagatgatcctgcagcatctgcagcgagatggaaaagctattttggagaatgtatctgaacagggacaggagcttccaggctgccttgggagacatcagaacccaggtcacgcaattgaagcaggttggtttctgctgcagcatgccattgctcactctgacgatagcttggtgcaaacagcagtggagaaatttgtaatgcttccttttcttttggggtgggaccaggagtatgggggtctcttttcttttcaagatgttgatggacactgccctacacagctggagtggaacatgaagctgtggtggccacacacggaagcacttattgcctttcttctggcctatcaaaagactggagaccaacggcttctggagcattttgaaaaagtctgcgaatatgtattcagccggttttcagacccagaacagggggaatggtttggttacctaaacagagaaggtaatgtggcccttaccatcaaaggtggaccatttaaaggatgtttccatgttccaaggtgcctctatatgtgtgaggagatactctcccagcttctggatgcaaaaaacaaaacctgaaatctgcgccttaggtgtttactgggcattgctttatggatttataaggccaagccatgaatcattttgttgctgacattctaatccacttcattcatcgacaactaacaagctaatcagtcaaaaccagaaatcttttcaacttatattaaaaaaaaatatataactacctgtcctatgttctggttattttaataagctgtttaatttactgttcataatataattacatcattctaaaaataaacatcaatctaaaaaaaaaaaaaaa

SEQ ID NO: 491 - DNA, 3177 bp, Xenopus laevis
atcgaattccccgggcactgggaaggcgaagcgccatttttaaaatgtctcattgcaaaggcggaacaagcatttcggacgtttaaaatttcctttttttatacgtcacgactgtaatcataatgcagcacatacatagagaactagctgctattctcgctccctgactcttcactcttaagcttcccctgttgctaaaaagatggaaacccttccagaaatgcttcctcaaatgagcagtactctcgccatttctgctgctgacaccgaactacagaaacttctgatcgatgaacgaatgagatgtgagcatcacaaaacaaactatcagacactgaaggcagagcataccaggttgcaggacgagtatataaaatctcaaaatgagtgtaaacgactgctggtggaaaagcagaacacacaagagaaattccagcttatgcttgctgagttacgaggggagcttttagataaaacacgggaagctgaagagctgaaacttaaagtgttatcacctcagaaattagagctgctaaaaattcaaatactagaagaacaagacgctccaatgaaagaacgttatcagcagctggaggaagaagcagaaaaatacaggggtgattataataagctaagatatgagcttacaatgctaagagcagaatttgaccatcaaaaggaagaacatgaacgcgttttacaggaacgacggataaaatatgaagctgagattttacaactagaaagagaaaagaaagagctccatgatcagatcatgtctgttgatcccacaagagacagcaaacgcgtggaggttctcttaagggaaaaagctcaattataccaaaagctaaaacgcttagaagctgagaccactgaactgcgagcagaaagggaaaattatggtgcacaggcagaaaatgtccagagaatacaggtgcgacagatggctgagaatcaagcaaccattcgttctctggaggcagaaaaacagtctatgaaattgcagcttgaacatttgaataaacaacttcatgaatctacagagcaaaatacaattctgaccacaaagttgcacaaaatggaaagagaagtaaatgctctaactagcaggtcagatgaactcaaatattcctataaaatggaaatttctaatatcaagctagaagcagcaaaaacaaagaatgaagtggaacgagagagagacaaagttcaaaatcaggtggatgtaatgcacactgaaaatgaaatcctgaaagcaacacttgataggcaaaaagaaatattggctgaaaaagatcgtgaattgatacgaaaagtacaggctgccaaagaagcaggatttcagcagcttgtcacacttcaggatgaaaggctggagttagaaaatagaatagctgaactggagcggtataaattggagcatgacaaccagaaacagactgaaatcagccagatagaagaaaaactgcatattgcgcagacagcagaggagtcgactagaagagagcttcagagtttaagatcaaaacatcagcagcaagtttcctatatagagcagctacaaaaggagaaacatgatgaagaagaccttaaacagcaaattaatgaattgaaaatacaagttacttctttgtcagaatcggaaaatagcttgctgcttgctaatgaaaaactgcgagaattagtggaacgattaaaactggaaaatcgtagtgcaagaaatcaagttgagaaaacacaaaatgatgcagaaaaagagctggagtcaaaccagatagaatggctgcaagaaaaacacaaattacagaaaaccttatctgaactgcaggagaaatacagccaaatgaaagagaaactgcagagagcagcagctgcccagaagaagaggaagtctttaaatgaaaataaatgcactaaacttcagaagaaaatagaattgttggaggcaacgaaggaagaattagaggctcaaaagcatgtgttaaacagacagaatgttccacatgaagaatttggtcgacttcaaaaaaagctaaaagacctgcagcgaagacataatgaatttcgaagtctcattttgggtccaaatattccagcatctggactaattaatccagctagcttcctgtcttccacggtgctgccaggtgctgacctctcctttataaatgctcaggaggaacagcaccaaagggaactgtcattgcttcgtaagagattagaggaactagaaactacccagaggaagcagctggaagaacttggtcctccctttcagcacagcaagcttgacagcagtcagtcagtatcacaaaaacttaccattgatggagaggactaaaagatcaattaatcaccatttcacgtgtgttaaaattacactgcaatacacccaagtgaaaaaatatatgcaaaaacatttcatgccgtacatacaatctgtactgattgcacacaagggcagttctcctgtgaattaacttttagtatgttatagaaggactggttctaagtaacttttcaattagtcttcttcttttataatttttttaattacttgccttcctcttttaactccttccagctttcgtttgtgggacaatgacccgggcatccaaaaaaactattactctgtgaggcttcaatttcaaattagagaactgctaaacaaaaactaaaataaatacagaaataaaatggagaccaattgcaaattgtcccagaaaagcactctctacatcatactaaaatttaatttaaaggtgaacaacccctttaataccaatggcttgtttcattgatttttcttctccgtttgtaaagcttgacagtttgttggcctaaacaagttatgaaacactaacactgtacctcagaaaatgtgtattttttatttcagtaatctgatctaaatactgtgtatatttgtgttttccacctgttatttattaagattaaatggtcacaaaacaaaaatgattatacaatttacactatgcaacaacctatattataagtagggcctattttccttaccataaatagactggaatttcattctttgtaatatttatgtaattctaaacaccgagcacattgttttatgtggaaaaataaattttgtgaaatcattttaaaaaaaaaaaaaaaaaaaaaaaaaaaaaaaaaaaaaaa

SEQ ID NO: 492 - DNA, 5660 bp, Xenopus laevis
ggacatttttttccttccttcatttccttttttcccctttttcttttctttctctttttttctccccttttctccactcgttcactttttcccattttttgttttgtcggctcttctattttgtaatgccccctagcctcccgcgcgtgtctccggcgggctcccctccttctcctgtttcacagagccggggctgaccgggctggagggaaggctgaggcatccatatcattactgcagcagcaactcgccataataccgatttattcgttcgctttcattcgtcccatcaaccacccccttccccgaaccccttcctctgctcctgagcgctgagaaacccttacagactgtggggagaagagacggccgaaaagaacaaggttgctacaccctgctctgtattatgctgaagatgtcccatggccacacaacccaggaagctctagagattatgaaggagtcggagaagtgtctggttgaggaatctttaaacagaagcaaggctctgtccagatcccctagtaaagaggaccaggaatccgatgagccaaactcacgtcaggaaccacagaggcggaatgcaagccacggacatgctaggaagagagccaagtctaactcaaagttaaagcttgtaagaagtttagctgtctgtgaagagtcttctggacctttcgtagatggccctttggaaccacaggatgtcatccatctacatattagctgcccatctgacaaggaagagaaagcctgtaaagatggatctgagaaagaagaaaaaagtaaagaaaagggtcctaagaaaatgctgtccagagactcaagtcaggagtacacagactctacaggaatagatgtacatgaatttttagtgaatacactgaaaaataatccaagggacagaatgatgctgctaaaattagaacaagaaattcttgaattcattaatgataatagcaatcagtttaagaagtttccacagatgacctcatatcacaggatgcttttacaccgtgctgctgcatactttggcatggatcataatgtagaccaaacaggcaaagccgtcatcatcaataagaccagtaacacacgaattcctgaccagaggttttctgagcacatcaaggatgagaagagctgtgaattccaacagcggttcattctgaagagagatgatgccagcatggatcgggatgataatcagattagagtaccattacaggatggcagacggagcaagtccatagaagagagagaagaggaatatcaacgggtacgagagagaatttttgcacgggagtctgcccaaaatggtcatattgtagaaagcagagggaacagagacttgctgaatcgaggctctggcagtcggcagagcagcactgaaagcgaactgaagtctctggatcccaggccctggagcagcacagactcagatggctcctgtcgaaacatgcgtcctcctgtaaccaaagccagcagctttagtggcatctccatcttaacaagaggggatagtattgggagcaataaaagcaccaacaaccgcactggcaggccaggtttgctacttggtaccccagaagtatgcactcaagcgtctcagcagtcctctcgaagcataatcccatgcaatgcacagcaacagcagccccatcctcaccaaacacttccacccactccccagcaacagtccatgagtaaccatttaatatcacagaccctccagccctcttcacaaccgctccagtactccgccagctcctgcccccaagtcattctaccagtttcacctccccagcagtacaatgcggatgatttaaataatcattttcatcagatgactctaagtcgccagggctcctctgaggcaccagatccttcctctgccatctaccaaccacctctcatctcccagcatccccagcaggctggctacatcatgacatctggggggcaagctctaaccacgaccggctacccttcctcagggcacccatccccaacacaacaagtcatctctacgcagggatacatgcagcctccacagcaaattcaggtctcgtattaccccacggggcagtacccaaactctagccagcaatacagacctctgtcacacccagctgcctacaattcacagcgtaatcagcaggtcacccagccaactcagcaacctggtatgcagccaattgtttccagtcagcctccttcttaccagggcatgatgagtgtgcagcagtcacagaattctgccataattagcaaccagagagccagtgttggcaatcagatgcagagcatgatggtgcagttcactccactcccctcatatcaagtcccagtgggaaatgaatcacagggagttgtgccgcagacctatcagcagtccgtgctagtccccaccaaccaatctgttcagggagccatgccaaccagtgggatgccagtttactatagtgttataccaccagctcaacaaaatggctccagtccatcagttggctttctcccacctcctggctcagagcaatacccgatgcctcaatctccctcaccttgtagccctacacagattcaacagcagtatccaggagtgaacccttcaggcctgggagttgttgtaatgcagctgaatgtacccaatggcccacaggctccttcccagaacccacaaatggtacagtggaaccactgcaaatattttaacatggaccagaggggacagaagccggaacatttatataacccagatgtcggcagccaggccagtaacctgctgagcagtcccattacttccccagcgcagtctccaacgccttcgccaggctccagcataaatagcgtgtgcactgggctttcaccactttctgtcctcacccaatttcctcggcctgtgggccctgcacaaggtgatgctagatactcccttctaggacaaccactgcagtacaacctctcagtctgcccccctttactgcacagccagtccccataccctacacaaatgacagggatgaagcatggaaaccgagggaaaaggcaggctctgaaatctgcttcaacggacttgggtacaactgatgtagttcttggccgggtcttggaaataacagatctgccagagggcatcactcgagctgaagctggaaagctttttacacagttggcaatgtccggggccaaaatccagtggctgagagacactcagggtcataatcaagggcccaatggtgacaacaatggacctacagaaaatggccgccaaacccacaacagtgatctggcagcgttttacaccattgtggcagtcttcccaagcaccacagcagcacagaatgcctcagtacagcttaataacccaatcagccacttcaaactgcgcagcatcaagaagaactatgatttgcgcatactagaacgtgccagctcccagtagcatgtggagaagggcgggagaggtgtgagaaaagtggcaagaagacagagaagggggaatagactcctcacaatccccccttttttatcactctttccccttcttccctttcctgcccccaaaaatagaagcacactggacttagaaatacagcctctcccttccccagttttcttttcttctttcgtcctttgccagtccctttcacttgcttcacttggctcactatgttttgcttcattacgggtgactaattctagttattaagagtcatagacagggtagcaatgatcaagttaatctctcatcttttcagccatattcacattctgtaatattaaaataaggatacgatgaagaaagcacaaatgatccactttcagatacaaacattctattcatgggtgctatgcgcctctgaataaaacttgcgtacaattgttccgaaaggccgttttgtgcggttacttgttggaagctgcaggacttatcaactttaagaagatccccccgcccccatacagttttgaacacagaagcagtaaaatatgcaacgttttagtttgagttgagaatgcaatgaagaatggaacatatgttttctcccattttattccactatagtgacaaaatatttaacaagtggaaatagaggaaaattaagttatctgaataccacatttaattatgctggatcacaaattgcaccaaatcctccagtgatgtacaatgcatgaacatgtgttgcttttagaagtctcactaaaaattttgttatgcactaatatgctttttagaccactcaatgtgttccgtttgtgtgtgcataggcctagtcttagctctaggactagttccagatgttctagccatatctgctgttcttccagaatgcattttttcctgtgacttcctactgattcaaaacaaagaccgatacagagcacatctgatggcgttgtggggaagcagctgttgtgactatgcatgcaggtggcaaacgaagtgtgcaggttcccaagagactaggattattttacacataaacaatatacatggggtgttctaaacatacacttaagatatggacagtttgtgagaattgaactgtaacacacagttttcaggcaagcgtgtgagacaccatatttgtcttacccagcaatcggtatacggcttgatctaaactcatggagaatgctgcccttatagagcgatagtaagtgcaaatggtgctaaaagggacagttttagaggtatctgtattcacttttcgaaacaggataattatatgcaggggactgcattgtgtatcctctggtatcccttaacatcaacgcttagattaagaactaatgttagctgatccacatatcctcagatctgaaatgaaggtctgctggaaccataaaggtggaagtcctggcttcatcctaatgctgctttgccagtggccctggaactagagttgtacaccccaaatttctgtcagtctactcttggttcattcacagcttcttgcactttgtttcactcttaattgcgcaatcaacttgttttactgatgtttttccctttaaaatttgtgttttacactttttttcttgttcatatacagttttctcattcacttgttatttgtcctttgctatttctctctttacctttgcatcattgtgtttattaattctgacctctcctaccagcctgttgtttttattcttcctttccctttatatgttgcacatcctgcacccattgctgtaccttgcaggcactattctgcctaaagcgatgaaacctgtcgcccctcccccacctgcctaacttctgtttaaagaaacgttaacccatttgttgatcaagagttgagtttcgctgcaccaggaaccaaactgccacatgctgaaggaaaagacagagaaaaattacaatttttttgcccagagtggaaaaatcgaccttttatttctttttcttggagttggttgtccctgaacattgtatagtttttttttttttttttttctttgatgcttgtgagagtacattaacatgggtatttatttgcacagatgggctgtactcactgtaaatttttatttaatccaattttgtttttaaatatggaaaaaaaagaaatatgtgtcacattaaaaacaagtgtgtccttttaaaaaaaaaaaaaaaaaaaaaaaaaaaaaaaaaaaaaaag

SEQ ID NO: 493 - DNA, 1349 bp, Xenopus laevis
aggactcgggggacgagagaacagcgggatggcggatgatgaagatggttcaccagaagagaggctcttgttccttcctgaccgccatgtccgctattttcagcgtagtctgcagctcctaccagagcaatgcgcctctttagagacaagcagattaacaattgcattttttgcactctctggactcgatatgctggattccctgaacgtgatcaacaaatcagaaatcatagaatggatttattctcttcaagtccttcccaccgaagaccagtcaaatcttcatcgatgtggctttcgcggatcttcatgtttggggttaccatttaatccttccaagggccatggacttcatcacccatatgacagtagccatgtagcaatgacttacacagctatagctagccttctaatactgggcgatgatttaagtcgtgtaaataaggaggcgtgcctggcaggactgcgtgctcttcagctctctgatggaagcttttgtgctgtgctcgagcaaagtgaaaacgacatgcgatttgtatactgtgctgcctgtatttgttacatgctcaatgactggtcgggtatggatatagaaagatcgattgattacattaggaggagtatgtcatatgaaaatgctttgggacagggggctggattggaagcccatggcggctctaccttttgtggaattgcttccctttgcttgatgggcaaactggaggaggtattttcagagaaggaactgaacagaatgcgaaggtggtgcatattgaggcaacaaaatggttttcacggaaggccaaacaaacctgttgacacttgttactccttttgggtcggagcaactctaatgctcttggacatcttcaaatatacaaattttgaaaaaaacagaaattttatattgtccacccaggatcgcattgttggaggttttgctaaatggccagatagccacccagatgcattgcatgcctactttgggatctgtggcctgtctcttataggagagcctggcatctgtgaagtccatccagctctgaatgtaagtttaacaacatataagcatctccagcagctgcacgactcttggaaatcaaaggactgtgaaaggaactccgataatatgcacattggaacttgaacgaccacatcagcgttacatttggtggcaacgctctaggccactgtataaagccatgtactaccaagtgtactttcatattggagtcattcgaacaaagtgttcttgagtaatctcacagcaatgttcagcagccaattcacttttacctgaataaaaagatttttttttttaattgttaaaaaaaaaaaaaaaaaaaaaa

SEQ ID NO: 494 - DNA, 965 bp, Xenopus laevis
ggggcacagtgatctacaggggacgctgggtactgagggtgacagtctatgtatttattggaatcatctttggaccccagtggacataataacccaggtgtcagctctgcagccaacatgcccaaacgacgagccaagactcctgcaccagagccagacctgactcccaactccctgcaactcctgaagcgagctcagctgcaacagcactgcaaacggcttggactgcgggggacaggcaagaatgcagagctggttcagaggctacaggagtacttccagcaagcggcagccaatgagcaggaggaggatcccacgactcccagtctggatgagaatgagaaggaatcagaagaagtgacagtaggccgaggctggtgtgtggtccatggacaagagatgacagttagtagctggaagccattatttctccgctgtggacgtgtgtgtgtgacgtgtgagggctcgtgtgtccccttacacctgactccttcctcctttcccactccctgtggcctccaggacaatctcatctgtgacgagtgttttgagaggaatcaggagagggaatgtcgtttgcagcagaggtcggtcttccaagataactaccccccaatggggcaaatgagaaaatctgttagcacaactcgcacacggaaaaagtctggtcgcttccagcctcaagaggaccctgaatatgctcgtagggtggatgagctactggaccagctggccaccgggcaagttgattctcagaagatcctaaagccgagccgacctgcagttctgcactcgccccttccaaagccggagagcagcccaattgccatcaatcagtaactgcactcgcagcccctccactaaactctgggccaatgagcagcatttccagctgttgtggattttaatattgtgttttacacaggtgaataaatggatgtttttttaaaaaaaaaaaaaaaaaa

SEQ ID NO: 495 - DNA, 506 bp, Xenopus laevis
gttctctttcctttcctccattttgagagacgccgagaggccgcttgtaaaatgcagctttttgtcagagggcagagtctgcacaccctagaggtgtctggacaggagactgtttcccagatcaaggatcaaatctcctctctggagggaatctcttctgaggatcaggttgttctccttgctggctccccactttctgaggaacataccctgcaacaatgcggcgtatgtgatctcagcaccttggatgtagttgcacggctgttgggaggtaaagtccacggctctctcgctcgtgccggaaaagtgcgaggccaaactccaaaggtggccaagcaagagaagaagaaaaagaagactggccgggccaagagacgcatgcagtataacagacgcttcgtcaatgtcgtacccacctttggcaagaagaagggacctaatgccaactcttaaatgatcagagttcaataaacagctgaaaaaaaaaaaaaaaaaaaaaaaaaaaa

SEQ ID NO: 496 - DNA, 1474 bp, Xenopus laevis
atcatacgtccgttacaacattcgctgtggattactttgttgggattcttctcagctaagaggcgtttattttttattttatttttgttttatacagtttcattttttaccctgaaagatgtgttctggcggctgtgcaaagtgcttgggcattagtcttataccactagccattctgtgtatattggctaatatattattatttttccctggaggaaaagttgctgataataatgaccatatcacgaatgaagtctggtactttggaggaatattgggttctggagttctgatgatttttccagcattggtgtttctgggtctaaagaacaatgactgctgtgggtgttgtggcaatgagagctgcggaaaaagatttgctatgttcacttctataatatttgctgccattggcttcgttggagctggttacagctttattatatcggcagttgccattcataagggaccaaaatgtgatgttggcaatggaaattatagctatccattccatgacggaaactacttgggaaacacagatatgtggaaattatgtgcagggcctggtgatattgtaccatggaacttgactctcttctgcttgctcctcataatgagcggtgttcaggccgtactctgcgccattcaagcaatcaatggactcataggaacaatctgtggggactgcaaatgttgtggatgttgtgggggtgacggtcctgtttaactctactccagtcctcagtaaatccgacagcagtctcttcatcgagcatggagaagatttctgtgcaggaatccagttcctccgatgaacactatagcgggaagattaaggatgaaggactaacattcagctctgacttaatcttcagcctcttagacagaatatttaactgctaaacaatatttgcagcactgcagataatgccaccttgttggtgcactatataattttcctttttttccaagtgaacatgaacaatcgggttccatttaactccagcatgttgtccagttcagatatttacactatattagggcatgcattcaggatgtgctttatcagatttatccgcttgtattcttgcatcctagtaagtctcgtaaagtaggtgagaggggatgtgccctgcaatgctgctatcagaactgataatatttattgcttcacttttatacttcccaaggatcaccagcataggcagcaatggctggaggatggaaaaaccattgtagtttaccagaatttgctctgaaaacatagaaagaatgtcaaaattgcaatcataatgtcagccccatggattcagtgctatactcacccctgcaagttgaatattttcctgaaaaatacatattaacattttttaaaaacaatgcccaaaagtaacattatttatgtatgcaaataatatatgatgaataaagaaatgtttttttcaaaaaaaaaaaaaaaaaaaaaaaaaaaaaa

SEQ ID NO: 497 - DNA, 1591 bp, Xenopus laevis
agctttgggtcaatcagagacaaaaatgaaagtggtggagctgttgctgtgagaattctgacatccgaccaatttcccaaggcaaagatgatcagtggactgtggttggtggcccttctactgggggctgcaaaaggtggggaggtttgttattccaggatcggatgcttcccagacagtgtcccctggtctggaacagtggagaggccaataaaccatttaccccaatctccggaaaaaatcaacactcgtttccttttattcactcagcagaattccaacagcttccaggagatatctgctataaacccctctacaatctcttcatcaaattttaggaccaatcgtaaaactcgttttattattcatggctttattgacaaaggggaagagagttggctgacagacatgtgcaagacaatgttgcaagtggaagacgtgaactgtttctgtgtggactggatggggggatcccggactctctatacccaggcgtcaaacaatatccgtgttgtgggtgcagaagtggcttatttcattgacattctttcgagcacgtatggatactctcctgctaatgtacatgtcattggccacagtcttggagcacaagctgccggagaggctggaaagaggaggaaagggattggaaggatcacaggtcttgatccagctgagccctactttcaagggaccccaactgaagtgagacttgatccatctgatgcgaactttgtagatgttatacacacagatgcagccccaatgattccaaatttaggtcttggaatgagccaactagctggccatctggacttttttcccaatggaggagaagaaatgccggggtgtaagaagaacgccctctctcagattgtagatattgatggaatctggcaaggaacgcgtgactttgtggcgtgcaatcatctccgaagctacaagtactattccaacagcattctaaagcgagacggctttgttggctaccccagctcaacctacaacacctttaaaacgggctctgtattcccgtgccccagtggtggatgcccattaatgggtcactatgccgacacctataaaggacccataactggtggtcaaaagtttttcttgaacactggtgatgaaaaggattttgcacgttggaggtacagggtgacggttcagatcaccagctctagtgacgtacagggatatttccatgtgtctctctatggggtaaatggcaacacccgccagtatgaaatatacaaggggacccttaagtcaggcagttcttacacagggttcattgatgtggagtctgatgtgggaatcttggataaggtgaagtttgtttggaacaataacgtgatcaacattctcctgccaacagtgggcgctcagtctatatcagtccaatatggaaaagatggcagaacgtacagattctgcggcagcggctctgtgagagaggaggtccttcagaccctgaatgcttgttaaagtgacggcagaatcagcacttaaatattgtttcaatatgaatgaacataaaataaacaatttgctcaccaaaaaaaaaaaaaaaaaaaaaaaaaaaaaa

SEQ ID NO: 498 - DNA, 2302 bp, Xenopus laevis
acggagactaccgcaaggtgtagtccaagtgaaagcggcccgataccaacagcagagtctaaagacttgtaggagaacaactatagcatggcaggagaacagaagccatccagtagcattctggagcagtttattttactagccaaaggcacaaaaggttcagctcttccagctcttgtaaaccaagtattagaggctcctggagtttatgtatttggtgaacttttagatttacctcatgtgcaagagcttggtgatggaccccattctggttacttgaagcttctgaatttatttgcttatggaacttatcctgattatattgcctcaaaggacagcctgccagagctttcggctgtacagaagaacaagttaaaacatctgaccattgtgagtcttgcatcccggatgaagtgcattccttactccgttctcctgaaagatctggaaatgagaaatctcagggagctggaggatcttattatagaagctatttatacggacattattcagggcaaactggaccagcgcaatcaagtgttggaggtagatttctgcattgggcgggacattcccaaaaaggacatcagtagcattgtgaaaacacttcaagaatggtgcgatggctgtgaagctgtgttagtggggattgaacaacaagtcgtgagggcaaatcaatacaaggagactcacaatcgtacacaacagcaaatagaaacagaggtgacaaatataaaaaagactctgaaagccacagcttcctcatcggcgcaggatactgaccagcatttggcagagcgtgagggccctccacttactgagcaacgacagcccaccaaaaagatgtcaaaggttaaaggtctggtctccagtcgccactaatgaagatgggttcagggcggaggctccgggggcctgcacactctcccgggttgtttacagattaaactatgagtcacctgtgtatcagcctcttccaccctccattatttttggagaataataatgccatgggcaagaaagaacccattgcaataacaatgctctgacactgtttggttggcagtttttttatccgagcaggacaatttaccgagcagtttgcatacccttccctgccggagaggctttttgtgagagatgctgcaatgcacagcaggctcctctgccagttagagggtttataggaaaggcttctttttgctgattttggtcttgtcctctttctggagatttaaaatgtgcagtggggcagatttgtagataacgctctcctttcttcttaccagaatattttattttgctcttttttccaggttgaaagcttgtcactagcctttatatagattataatatttgaaggtcccaaaaggtattgcagtaaacccacagaaagtaaatatggcgacactattttgtaaagagaagtgggtgatgggtagaagagaaagttgggggaacttcattttgtaatggcacaacttggttctcatgtttaaaaaaaggcttacagtcaagttggcaatgtaaaatatcctgattaatatttggtcatttggggtttactgattgaaacaaagcaactgtagctggtgtggtccatgctcatgccacttaaaggagaaggaaagctaacagcagtttattgccaatagatttgccacaatagtgcaaactataagattatatttattctgcagaatgctttaccatacctaagtaaacagctctagaagctctatttgtttagcatagtaacagccatattaacttgatgtgacatcctgcctaattctctccctgcacactcatagctctgggctcagattacagcagggaggggaggagggagggggtaaaagggagggggagagatgcaaattgagcatgctcaagccctagccctggaggtttatgctgaaaacgggaagtctgatacagaagcccatgtgcacataatagccggaaagaaatgtttcttttgaaagaggactcaaagcagcattactttgagggtttactggtatatttatatagacctgataaagcttacttaattttagcctttccttctccttcaagagcaggaaggaaatggtgctaggggaaacctctagctattctaaaagccctttacacttgccttgcgaaaatattgtggattttacatgcaggtctgacttgtatggagcaatcactgcattgacccagttatgtcctcagttggggaagtgtgcagcctgtcgatgatcttgttgctgtgcgtataaatctccaaataattattaaaaaaaaaaaaaaa

SEQ ID NO: 499 - DNA, 2701 bp, Xenopus laevis
ctctaactcagcaagcgaggaagctgcagcctcaggttacattcataaaagtcctgtgcttgaagtcaattttggacaggaatgaagcatcctgactgatgagaaggcccccacccccaggatctttcatggacagactgagcgaatacaccttcggaaagcaatgaggcttatacagtggcaaacttgtcctttccctggccacagttgttgttccttttgcatgtcaaggtgatatttacaagcaaagctgcattgacttcgacactcagtttctctgtaatttcatttttactgtctggaaagagtgacatgatgcagaggccttatcaaagtggaaacaactgagctgaaatggttttatacactaccccctttcccagcagcttcctttcatccctccactccctgtcctgggccctgattttcccctgctattggttgggagatcggttactggcttcattcttgccaaccacatatgagaaacgacaacggtcagatgatccatgttacttccaggccctctgcattatcataaccacacccatttatttagcactgctggtttcatcacttccatttgcctttataggattcctggtgtggtctcctattcaggcagcacgcagaccctatgtctattcccatatacaggagaaagctcgtgcaacagaagccaagttgctggctgaatggagagcaacaagcagtgggaaaagcttctgctttggaactgccaatgtttgccttttgcctgactcaattgcaaggttcaataacctttttaatacccaagctcgggctaaagaaatagggagaagaatacgcaatggggcaagtagaccacaaattaagatatacatagactctcctactaacacttctataagtgctgccagttttagcagtctggtgtctccccaaggtggtgatacatctcaccgagcagtaaatgttggtatgaaaagaacaacctctatggaatacaaaggggaaaattctggtgaaaacagcagtgaggagaacagagatgggagaaatggaggagacacggctgatggagaagactgtccatgcatcatccgtataagtggagaggacagtggccacatctctgacacagagactgatgccattagtggacatgtcaatgttgcatgcttggcagaaattgagccagattttcaaaagagtccaacagctaaccataagaataaggatgcagatggtggaagtcttgatagttatacagcctcccgggagtcactagtcaaggtccggatggcagatggagctgctgaccaaagcagcattaacactaagcttttacataaaacatctataatcaagaaggccactgcccggaagaagaaacacacagatgatatattagaccatgagatttctgccttttttccagccaacttggactttttgtgcctccaggaagtatttgacaaacgtgctgcagaaaaattgaaagagcagttgcactactattttgaatatgtgctgtatgatgtgggggtttatagctgccatgggtgctgtggttttaagttccttaacagtgggcttctgtttgccagtcgttaccccatactagatgctacctatcactgttatcccaatgggagaggaatagatgcacttgcagccaaaggagctttgttcattaaggtgcaggttggaaccactcctcaggaccaaagaatagtgggatacatctcctgcactcacctgcatgctttggcaggagatgcagtgacccgatgtgagcaattagatatgcttcaagagtgggtgtctgaattccgcaaatctacctcctcctccagcgctgcaaacccggaggagctggtggcttttgatgttatctgtggggaccttaactttgacaactgctcatcagaggacaaactggagcagcaacactctttgtttacacattacaaggacccgtgccggctgagcccaggggaagaaaagccctgggcaataggaacacttttggaccccgagggtctgtatgatgaggaagtgtgcaccccagataatctgcaaaaagtcctggagaatgaagaaggcaggaaggaatatatagtgtatcccaccagcaagaaccattgtcccaaccagaaggggagaaaggttccattgaaaggcagtggacgcagggtggattatatgttatatactgaggagggactcaacatggagtggaaagtggatgtagaagaatacagttttataacacagctagctggactaaccgatcatgtgccggtagcctttcgactgacagtttccacaggggaagaagaatcctaaacattaactaaactagaattaatgagacagcatacatggcccatgtttactatgagctccaaagtctggagtgtcctgaaggagccacgtatgtctccacttttttgactacacgatggggacagatttacctgctgaagaaaatggataccagagcagctcccccagcaagctgtgacctctccacaattgaacagagagggagaaacatgaaacagaaccagtgccattcttaccaagatgtttttataccactatatagcacaatttagtttgtaaccgtgagatgccgttctgttttctttttttcctttcttttttttgcataattttgtatatcttaagagaaaaaaaaaaaaaaaaaaaa

SEQ ID NO: 500 - DNA, 813 bp, Xenopus laevis
cagagccggtgagtatggctgaatccttggcctggctgtaatcttgcctgtatcccggccatcctctgtctggctgtcgcactaatgtgctcactaaagagcgcgcttcggacgctgccgcttcaacacgttcttgggcatctttgacttgtgcgtgtcgttggaatgggacgacaaaataatggccggctctttccagcttccaggctgactccgaaactgaggcgcctatgggctccgtgtctgggatcctgtgctccttcccatggctaatacttatctttgttgctcatacggggctgctgggactgatgaacctgtgtttgtgtgcgagccctcagtttggccgacaattgccaggcaccatggtgcgcatgaacgtccttgccgatgctctgaaaagcatcaataatgcagagaaacgtggcaagcgccaggtcctcatccgaccatgttcaaaagtgatagtgagattcctgaccgtaatgatgaagcatggttatattggggagtttgagattattgatgatcacagagctgggaaaattgtagtcaatctcacaggaaggcttaacaagtgtggtgtcattagccccagatttgatgttcaactgaaggatctggagaagtggcaaaataacctcttgccatcacgtcagtttgggtatattgtgctcactacttcagctggcatcatggaccatgaagaagccaggcgaaaacacacaggaggcaaaatcctgggattctttttctaagcgacacaagaaaataaactgttatcaaagaaaaaaaaaaaaaaaaaaaaaaaaa

SEQ ID NO: 501 - DNA, 1267 bp, Xenopus laevis
cgcgcggtattatagtatttacagattgcaagtcttaggggatgtcgtttaaacgggatggggatgatagtagccagctgaacgtgctgaagaagaggagagttgcagatctgctggccagttacatcccggaggatgaggctttgctgctcaaaaatggcagctacgcttgcaccgtgtgccatcaccggccggtcttcaataccatcgatatgctgtctgtgcacaggactgggaagaagcacttaggaggcctgcagcggtattacggcaagaagttggaacacaagaatgagatccagaaaaggcgtcactttgattttgtacgggcagaagatgcaggagaaaagcctccaccaggccctgcccctttgctggtccagaccaagaggattacccagaatgctctgctgaaatccgccccatataatagctgctgctctaacaagaaggtagtagctaatagcaggaacgtctatgatccccattctggcccgtccacaaccacaggcttaaatgttcctctggacacccaacctgggcccagtcaacctcatacctccctacattctccccctactggaccctgcagcagccccacagatgagatcccaccaaataagaacaacagtcggcacaagaagaagggcgaggagaagtttaggaaggaaattgcagacccagaacgggagaggaatatggagcactacctgcagctgaagagctctgggtggatacctgacgggactggcaagtgggtgaaggatgagaatgttgaatttgactccgatgaagaggaacctccagctttgcccccctcctgactggcggcttctcagtatgacctgacagtagcaactggcggcttctcagtatgacctgacggtagcaactggcggcttctcagtatgacctgacggtagcaagagtgcagataaagcattaatggactggaatactaaagtgaacttacctttgcaaacagggaatccacagaacttctttatagtggggactgtggtttggtggcacttatgggcggttcggcttggcactgccctttacgttagggacaaagtgaaatttgaattctcctacttttctgcattaccacaagctgcccattagagggcgctgcagctcaagcatccagtctcggatttgttttcagtaaacactcggcatctttctttgccctgcatgaaactgagacaccttgttactataaatgccttaagggccaaaaaaaaaaaaaaaaaaaaaaaaa

SEQ ID NO: 502 - DNA, 1344 bp, Xenopus laevis
gcttcccagcagcctccctctagcagcagtacgacagctctcctccccctgaagcaatgaacagggaagaaggagcaggccggagcctgaaggcatggttgcaggacaagtactgtgatcacccatcagaacaatgccaggatacccgtttgcacaatgccgcctgtgtgggggatattgacaccctgaggagccttctacgggatgagaggtttctaaggtgtatagatgagcgagctgtgtggtgtagcggctggctgccctgttctcccttgcgcattgcagccacggccggacatgctgactgtgtggagctcctgatccgctctggggcgcagctggagctggttgatgtgaaggggcagacccctctctatgtggctgcagaaaatggacacctggaatgtgtgaaagttctgttacgagcaggggcagacccaaacggcagtccccataataggagctcccctgtataccatgctgcacgtgtgggccgggctgacatactgcaggaattgatcaagtatggtgccgatgtcgatgtggatcaccagctgtcttttcgtggttctggctcctcccctcgattgctgacatctcttgcctcctgtccgctctatattagtgcagcttatcacaatctagcctgcttccacctcctgctccaggctggtgcaaacccagactataactattggggaaaagtatgcgaggagaactttccaagaggggctccttgttgcttactagaggcagttctgcggcatggatgtgatcagcaatttgtgcagcttcttgttgactttggggcaaatctgaaacttgtgcggggagagccatgtgcagaggaacatccaaggataagtgtgaaccccacagcccttcaagtttttaatgaagctaaagcttgcccttgctcactttccagcctgtgtcgtatcatagtgaggagagcacttggaaaacagagattgtcttctgcctgcaaccttcctgttccaccccgagtgttgtgcttcctactccatgaactgccttgattttcctcactacagtcaagttgtacagagtgcagccggataccaaactctctgaaagaagtcttccacaaacatctacatagctaaacctacatttaatgtctatgaattgagcatattgactgataagcctgtgatcatatacatgaatgtctaattctagtgtcatcagagaaggtgagcaggacttgcctttcctgccctgcctgtgttttgaaatgggcatttgctcaaacagacctttataggaagagtaaattattaaaggtttgatcaaaaaaaaaaaaaaaaaaaaaaaaaaaaa

SEQ ID NO: 503 - DNA, 780 bp, Xenopus laevis
gtggacagtgcagtcctacaacttcctgaaaactgcgctgtggaactgctgcggcccaagcaaagccggagctgtgcagtccatgtgacaactgatccaagcatgacgaggcagacagaagagagaatgtgtcatttatctattagcaagggatccttccttcctggactgaatcgtataagcgaaggtctataccttgcaagtgcaaaggcagccagtaacagaactttgcttgccacacatcgtatcacttgtgttataaatgtctctcaagaaattgctaaaaatgaagctcctgaactcgagtatgttaacattcctgtatctgacactcctgacacttgccttttacaatattttgaagacatagcggacaagatccacacagtaaaagctggtggtggaaatacactgctccattgtgtagctggtatcagtaggtctcctacactctgccttgccttcctgatgaaatatcatggtctttcccttcaggcagcacatgattgggtaaaaacgtgcagacctattatccggcccaatttaggcttttggacacagctcatgacctacgaaatgtccttgtttgggaagaatactgtcaccatcattgactcaccagtgggacctattccaagcatttatgagaaagaaacaaaaaacttcattcccttttaaaatagttttagctattacaggctgaaaactttcatcaactttttctttctgatattaaaataaaaaaacagaaaaaaaaaaaaaaaaaaaaaaaaaaaaaaa

SEQ ID NO: 504 - DNA, 849 bp, Xenopus laevis
catgaagtggatgttcaaggaagaccattcgctggaacacaggtgtgtggagtcggcaaaaatcagagccaagtatccagatcgggttccggtcattgtggaaaaggtttcaggctcccagattgtagatatcgataaacggaagtacctggttccatccgacattactgtggcccagttcatgtggataatcagaaaacggattcagttgccatcagagaaagcaattttcttgtttgtagacaagactgtgccacagtctagcctaacaatgggacaactctatgagaaagaaaaagacgaggatggattcttatatgtggcctacagtggagagaacacatttggcgtttgagactaagtgcagcctgtgaatcttgtaaataggtggttttgttttaacaccacacataaactcccatccattaggaaacactaaaactggatacaatttagtgatgcctatgtcttgatattcatgtttgtgtttaggctagtaacttaatgtaatttaattattattatttttttttctttttctgtttgtcatttaacattgctgctttaaaagggtattgcaacagtcctttagtagcaattatgtgatgccatttacacataacagaaagtgtgattttgagtaaatgaacattgttttattcagaatactcctggatttattttaggcccgctttcataaaatatatatatatagctcataaactcatggatgaattataccattaatccataactgtcctcttactggtatgtaacaatccaactttacaaaatccatcaaataaaattacaatattatcataaaaaaaaaaaaaaaaaaaaaaaaaa

SEQ ID NO: 505 - DNA, 811 bp, Xenopus laevis
gctcaatgcagcacagagggggttgctacagactggatgaactggttaactcacatataacagaaggaaagacatctatacttgcagcatgcacatgacatgattgatattaactagatctgccctccatttgtttgacatgaaaactgcgacatggccaacattcagttgagtgaggactcggtccggataattactgtaaccaaagaaacgagtcttggcctgagccttgttggagggattagcagaacagaagagctgctgatcttcattaaagatattatccctggaggagactgtcacaaggatgggcgacttaaaccaggagatcagcttgtatctataaataaggaatcgttggttggtgtatcgtgtgagcaagcaaaatgcatattaaacagagcaaaattaaggaaaggccctatttgggagattgctttcattacactaggtagggagcattgaaatcagattttaccagcagatggatgtgcgcaaggacaagaagcaatggattttataccaagcaggacctctattcccagtgccgcaaaagccagtctatcagctcaccaacctaattttgattttgatgcaatatttgataatcggcagaagctactcagctttgcagtgcccagtactgaattctcaatcaaattaaattagatgtcgccttggtgaaactgtgtccagtgctccagtggtggggtttgccaggtcgactaaacatttatagtatagcaaataaatccactggagagcaagtcataaaaaaaaaaaaaaaaaaaaaaaaaaaaaaaaaaaaaaa

SEQ ID NO: 506 - DNA, 1334 bp, Xenopus laevis
attttacacagacatctctctcttgggctaagcaaacatgcataaggtggacttgctaccagatccaaaagaaatagctgccactgagcgaaggaggaaccaagagcagcagaggcaaagccgaatatttaatgccaaatgtcgcaccatcggggttgatgtacagacactggacaaacaagtgcaggagctgaagttgaaagaaagagctgagaaagctagtgatgaagcatatgatgctgaaagtctgctgaatgataaaatagctcaaatactggagcagaggcaggagcagttggcacagagcttagagaaagcagtgcaagatttcaggaaccaacttcagcagcctcatacccgcagggagtttgacctgtatgaccccaaagctttaaagaaggaccaacctgcccgagtgggggatgaagaccccaggtgtgggccggccagcttgcagaaattcactggagaagatctgaatgagaaggaacggaagaagatgcagatggatctgaccaagaaatggttctcagagcagatagaagagagacagagaatgcagcaccaggcaaagtatgcagaccacttaaatgacaagaagagggtagaactggatgaaagggctttgaatctgagctccatggaagaagaatgcaggaaggccattaatctagccaccaaaaactacaatgaggccctggctttggaagcatcagagcacaaaaggctgaggaaccaacaggaacaagatgataattttgcagagatctataaccaccttacaggagacattttaacagagaaccctgctgctgcctccagtagttatggtccccaccgtgttatacccgatcgctggaagggtatgagtcccgagcagctccaagctataagggagacccaggatcaacaatgtcaggagaagcagaggctaaatgagcaagataagcagctggagacagagtgggcccatcagagagttttggcagcccgggcagcaatgacgctggaacagcaagaaatggaaatgaataaagaactgagaaagagactggatttatataaccagcagttgagcaaagagcagaaagcacacctggaatatctggagaaggaagtatatactaacaacccgactgcccactactacactcagttcaacactaccagccgctgactgctgggaccttgataaggtgctacctcttgcctccattctgatctcagcgctgcacagacctgggacatgtctatgctttgctatatgtgtgccttgtatagatcaataaagtagaagcatatgggaaaaaaaaaaaaaaaaaaaaaaaaaaaaa

SEQ ID NO: 507 - DNA, 912 bp, Xenopus laevis
atgacgtgttgtgtttatgtcgtgcagccgctgaggtaacgggcttgtcacggtcatggctatgtttcggaacctagtggcctcttcgcagcaccgacagcatcactctcaccagtcactggcgactccttcatccgcagacagtttagagactcagtttggctgtcccatttgtctggaggtttattataagcctgtggcgatcgggagctgcggacacacgttttgtggtgagtgcttgcagccatgcctccaggtctcctccccactgtgcccactttgccgcatgccatttgacccaaagaaggtagataaagcctccaatgtagataaacaactctcttcatacaaagctccatgcagaggctgcagtaaaaaggtgacccttgcaaagatgagagctcacatttcctcatgtcctaaggtacaagaacagatggccaactgcccaaagtttgttccagttctcccaacatcccaacccattcccagcaatatccccaatcggtccacatttgtatgcccatattgtggagcccgtaaccttgaccaacaggaacttgtaaagcactgcatggagaatcatcggaatgaccctaacaaagtggtatgtcccatctgttcagcaatgccatggggagacccgagctacaagagtgccaacttcctccaacatctgctccatcgacataaattttcttatgatacatttgtggattacagcattgatgaggaagcagcccttcaagcagcccttgctctgtctctttcagagaactgacaaaacgtttcgcacccgatgtccctcttctcggtgctaccaccaacagccgaggcttgtacattccttccaaaatatagcaatcacatttccttctcaaaaaaaaaaaaaaaaaaaaaaaaaaaaaaaaa

SEQ ID NO: 508 - DNA, 2258 bp, Xenopus laevis
agcgcccctgcgggtcccgattgctgcagccgcttgtcagtgtgacgaagattggcagcggatactggctcagtagccctgtcccctgtcagcgtgatgtgaaaggccaaggggcagtgtatcatgatgtctgctgagagactggacatggacaattactcagaggaacagcagctacaagtcatcactcaatttaaaactgaggaagatccagtgtgtgtcaattcctctgctccatctcctatgtctggggataatccgatggaggccgacaaacagtccatatacaggcacccactctttccccttcttgctctgctctttgagaaatgtgaaggctgcacccagggagcagaaggcacaacatccgccagctttgacttggatattgatacattcgtcaggcgccatcacaaggagggaaaggatttctactctaatgacccagagactgacagcctgatggtgaaagctatacaagtgctgcggatccacctgttggagttggagaaagtgaatgagctctgtaaggatttctgcagtcgctacatctcctgcttgaaaactaaaatgaacagtgagacactgctgagtggggaagctgctggcccgtactcacctgtgcagagtgggatcagcggggccctcagctcgcagggaattgtagttccagcctcagctttgcagcaagggaacgtggctgttgcaacagtggcagggggcacagtgtaccagcctgtgactgttgtgaccccacagggacagcttgtggctcaggctctgtcccctggcaccattcgttttcagaactctcagctgcagttacagctcagtcaggatctggggtttctgcactcagacgagggctcaggaaagaacaagcgaggagtccttcccaaacaggccactaacgtcatgagatcctggctcttccagcacattgggcacccgtaccccacagaggatgaaaagaagcagattgctattcagacaaacctgaccctgctccaggttaataattggtttattaacgccaggcgcagaatcttacagcccatgttggactccagcagcagcagcagcgagacaccaaaagccaagaagaagagtgggcagagtcgcccggtgcagagattctggcctgactccattgctgggggggcatcacagccggacacagacattactatttctgatggtacagtcgtgacactctcagcccccgggggtctcacaacagacagtttgcagtcattgacatcagatggagccacacttgctgttcagcaggtcatgctgggaggacaaagtgatgacgaatcattggatacagatcaggaggaaacagacactggaatcagtgagggggagctgaggggactagtgctgagtgctggggggctccagtgactgcttagtagtgattcatgggtttcatttgaggggcgcacctttaatctgatgaaatgtacccacagtgtgccctccctcactgccacaatcaacgtgtccttcacttgtgacgacttattttgcaccttaataagtggactccggcttctatgggtcacttgccacgagaccctcgtctcctagagccaaggggaagtgacccaaacagaccaggagcgggggttgtaatgtggacaataaagggctcccccagcccagaaaggggaattttgtatcatgtgtaggtcactaccagtcaagtgtatggtcaggccgctatggctggatttttttatttgtttttgagttattgtgccagggcatctcgagaaagttgttggtgatttccatgccgacccttaatatccatcaaatgtaccagttatggtgccaacgagtctggagaaagagttctgggtgactggctctcacattgggctaccatgattcacttgccaaatcttacagcccatcaattgcacaagttatggtgccagtgaatcttgagaagaaatggtgggagactctggtttctgactgatgccgactcctacagtgcatggagtgtgtgagttatggtgcccatgtgtctgcaattggagccgcactctgggtcctgcactgggccaccatcatttgtttcccaactatagtagcccaagtgttggctgattttactcccctaatgatagaactgtatttttgtagggttgtgagaaaataaaccttgaaagatctaaaaaaaaaaaaaaaaaaaaaaaaaaaaaaaaaaataaaaaaaaaaaaaaaaaaaaaaaaaaaaaaaa

SEQ ID NO: 509 - DNA, 2094 bp, Xenopus laevis
gtttgtagctacagtccatctgcccattggaaaggaagagacctccttgcacgtccccctcctcctctcactctgccctgtacagtgatcgctgcgaggggtcgcactcagcaactgcaatcaatcgtgccagcgctcaaatgccttcaggacgggaagcgcagtgacacaagcgacagtgtaaacttcccaggggcgcaagggaataacaagtcttctggctgtgcgccctctcttcctcccggacaggggatctgtgcgaactcagcagcaagtcgcaacttctaacttgtcgctccctgctgtccgacaacttctattcatattccactagattctcattattttgtgaagccggaataaatctccgtctagataatctgcgattgctgccgggcatggcgggttgctgcctaaatgcagagcaaaaggagtcgcagcggataaacgccgagatcgagaagcagctccgcagggataagagggatgcgcgtcgggagctgaagttgttgcttctgggtaccggagagagtgggaaaagcacctttataaagcagatgagaattattcatggatccggctacacagatgaagataggaaagggtttacaaaacttgtataccaaaacatattcacttcaatgcaggccatgatcagggctatggatacactacggatacagtactcttctgaacagaacatggaaaatgcattgttgattcgagaagttgaggtggacaaagtatccagtcttgaaaggaaacacgtagaggcaataaagaagctctgggaagatgagggcatccaagaatgttatgaccgaaggagagaatatcagctgtccgattccacaaagtactacctaagcgacattgatcgcgtttcaagctctggctttatccccacccagcaagatgtgctgagggtcagagttcccaccaccggaatcattgaatacccctttgatttagaaaacattatttttaggatggtggatgttgggggacagagatctgaaagacggaagtggattcactgctttgagaacgttacctccattattttcttagtggcattaagcgaatatgatcaggtccttgcggaatgtgacaatgagaaccgaatggaggaaagcaaggcgctgttccaaaccatcataacttacccctggtttcagaattcctcagttattctctttttgaacaaaaaggatcttcttcaagacaagattatgtactcccacctcattgactacttcccagaattcacaggtcctaaacaagatgctcaagctgcccgggacttcattctcaaactgtaccaggatcagaacccggacaaagagaaggtgatctactcgcacttcacctgtgcgacggatactgagaatattcgatttgtttttgctgctgtgaaagacacaatccttcagttgaacctgcgcgaattcaatttggtgtaagggatgggacatggacaattcattgggtggatttatcaggcgtaccgtactggggcgattccatagtctccggaatcatgcttgctacaggtttgatttggctcagtacagtcatcacaggttcttacacactgtaccgtgttctgagctcctgtaacattctctggtaaaacatgtaattgggaaaagcgaaagtaattttcctatccgtttactgcatattttttatttttaaagaaaagggaagtatgaaatgtacatgctgtttttataattcttcttaaggtgtttagtagttatttttattaaatatttgtgacaaaaaggatatttaagagaatattccatagaactttgtataagataaggcgatcctagggtttttattattgttaattcctgtatgggggggggggatagttattaaccagagttgcctttgtcattttttaaaacaaaagactgttagggtcatgagtggccatcgctagcgatgggtgaataaattagccggacacaaattcgcagtgaatttctgcgttgtcgcagtcaaattaatttgcaaaactgtgtcgacaatttgccggcaaaaaatctggcacgttaaaaaaaaaaaaaaaaaaaaaaaaaa

SEQ ID NO: 510 - DNA, 2659 bp, Xenopus laevis
ctctctccacctgttagaccggcgtctatctctctctgcagactgtaccaaagttatgccaggaatcccctcgcacaccaacaagggcgcacattacaggcagtaggagctggcagttgacaagttccatttctataaccaagagggactcacgtgattggcacagagacggcacaggaggagcagggatcaatgttcagaggaaatcatggcctcagaggaagaagagtttaactttgtctttaaagtggttctgattggagagtctggggtgggaaaaaccaacctcctctccaggtttacgaggaatgagttcagccacgacagccgcaccaccattggagtagagttctcaacccgcacgctaacagtagatgggcacctggtgaaatcacagatctgggacaccgccggcttggaacgctacagagccattacctccgcttattacaggggagcagtcggggctctcttggtctatgatatcaccaagcatcagtcttatgaaaatgtggaccggtggctgaaggagctgtatgaccatgcagatgccagcattgtagtcatgttggttgggaacaagtgtgaccttaaggatgaagcccaggaggtgccctcagaggaggccaaagcctatgcagaacaaaatggactgctttttatagaaacgtccgccttagacgccaccaatgtggaagtggcctttgaaacaatcctccgagacatctacacaagagttctgaagttgaaggggggaattcaacagccaagtacaataaacctgtccaaagaggcttctccaacccagtccatcacccaggttaccgagcagaagagatcttgttgccaaaacgtctagacttttggcaacatcgcaaataggaaaattcacagcacatgaagacaacaagaagttggaggccactgatccagcaaaggacttgatctctacttgttaagatctagaaataacgtagagtactatggtactcacccctaacaactagaacactggtaggaacaatgaccttgtctggtgtatgttggagtctgtttccctaaagattccaccattatgatgaaaggttcagtggacctggtagtactctaatcctcttccctcgtatcaaccttgtactttacttgcacaaagtattaattatgtttagctatcaaaaagacatgtgcctccaagttgcccttcttcttcccaccatactactattgaaggcaagtccaaccccacagaattagtagaagtatgctggaacagtaatagtgaatggaaccataaagtggtggcagcagaccctattctaaacatttaccaccaaagagttggaacatgtttttctattgctgtagtttttatgaagccgtgcagggcagagatagagcagctaatgtagtaaggagtgaaaaccaagatatagattaaaaggatttttaacaaatacaaacttctatttggaagtttctgtggtctgtgaaaaactgactatgtctgacttttgaggcaaaaatctgaaaaagcccaaaaaaaacctagcaattcgggaaaaaacccccatactatttggattttcgctcgcttttttcatgtttgtccccgatctgattaagcagtgctttttaaatattaaataagggtaaaatgtggattctagtttgctctgactttattttttataaaaatactcagaaatattttgataaataaggccctaaatgttaacttaaagttgaatcacttcaaaacagacatcggattggttgctatgggttactttgtgcctcttattgcatgtatggataaagtgtaacttgtaactataaagcttgacattttggggttcaagtgcttctttgaggcccaacttttggtaagggctcctcattccaaggatgcaaacactgccaggccccctcaaaccacatcagtatattctgcagctgcttcccaaccccaaaaatggacacgtgcattcaatatcagatagacatggaggaaggacacgggctgatggaactggtgctggtagaggggtggttgctagtgggtagaaggttggtccagggccctgtgggttctgcttatggcagttaagccactggttacagatataaggaatcactactgtatcagacattactgggagttgcaataacagcggcattgcaactgccagcaaaactaatgtaaagtgttaatgttgccatctgcctgccccatcttgctctactctgaatctatgttgcaccagctactgtttttgtctcctatccttcctacattcaactgcatattgaggggcccttagtgtggcctttaatggcccctcagcatgctcttatagttaggaattgtaacggataactagtgtatgtttttgtatgggtgtaataaaggcggctgtgcttggctgggtcagtaaaaaaagttccatgtctattaggcattagggaacattttatgaatctgccagatctagtgggagggcaagggtaactggatcattttaacaaatattggtgtgctctgggctgctgtgtgaattttaatgtacatgagaattgtgtaaataaagctaaagcccttttttttttaaaaaaaaaaaaaaaaaaaaaaaaaaaaaaaaaaaaaaaaaaaaaaaaaaaa

SEQ ID NO: 511 - DNA, 2575 bp, Xenopus laevis
ggcgaaagcgggaagtcagaaaactgctctcccctatgcacaacgacctttgacttcactgtctccccccttgtggcccctggccaatcctgctagcctcctgtgctccctccttcccagtagtggccctgttctgccctttttctatctgtcacatttggaagcaactctttgtctcggctcaatcacagagtcccagacagacattagctgatgggtttctcttccactgtctgatattgaactgatttctttgccttcctataatccagggattagcgcacactaaaaatctgatcgcagtagatgttctgttacgcctcatttacagattattccgcacttgctgtaccacgtgaaagccatgcataaagggtatttccatgtaatctaggctggatccatgtttctgtgttattcatacaatgacagagtactctgcccgtctcccagtgagcacagcactggcacttcatataaccctgtaaccacccgcagtgccacatcattctccattgatttgtgccattccattttcctcctctgtcctacaatatgtcccccactatatcgccacctttcttcctatggctggaggagatgggccttctgatgttcttgagggcacgacgactattcctacaagctgccattttcctctgtgtcctcatcttgcttctctgggtctctgtcttcttgtacggaagcttctactactcctacatgcccaccgtaaagtactccagccctgttcactaccaatacagctccacctgtgaacccccacctgggattctctgctcattccccacggccaatgtttccctccttcggaataatcgggatcgggtgcttatacatgggcagccttaccgtatttcacttgagctccagctgcccgaatctacagtcaatcaggatttggggatgttcatggtgactatgtcatgttacacacggggtggaaagcagatctcctacactgcccgatcagccatgctccattacaagtcaccgctcctgcgcacaatggagaccctggcctcctccccgttgctgttattgggcttttctgagcaaaagcaaagtctagaggtggagctataccccgagtaccgcgaggattcgtatgtccccactgtgggtgcagtgatacaggtacagagtgtcaggatagagatatacacggctgagctcagagtgcacgcctactttacaggaatacggtacctcttatatcatttccccgtcacatcagctgtgattggaatatccagcaattttatcttcttgagtgtcctggtcctgctcagttacctgcaatgggggtttgggagaacccgtctccgggatgtgcaacaacggacaagaaatgttagaggagctgagactcgtccggaaagtttttctcagacagaagacaaagaccagtcagatacagagactattgggcaaaatgatactgattcacagggagctcagcaaacggaaacacaagtggtgcaaaatatcagttctgatttggacacggacagtaacgctcagttctcagcgctccaccagcgcagcgcacaaagcagcagcaactgaagtgaaagcaactagggatgcacagagtccaggattcggtttgggattcggtccggattcaaccttttttagcaggattcggattcggtcgaatccttgtgtctggctgaaccgaatcctaatttgcataagtaaattaggaacagggagggaaatcacatgactcttcattacaaaacaaggagtaaaaaaaagttcacactttttcctttcccatcctaatttgcatatgcaaattcggatttgtttggacaaatcttccacaaaggattggaccgaatcacaaatagtggatccagtgcatccctaaaagcaagattggacaattagactgattcctttggtaggaccacatcaaaggtgctggaagtggtagcgaaggaagaggagtcaagagagtcatgttcctgttgaagggatcagactttagccatagggtttcatagttgagtcctgcatggaaccaatttctaagacccggacccgacccgaacccacagctcacaacccaaacctcagccaacccgacctgcaacccgccgaacaccatcaaaccagaagtgacgttgctgcaaactggaagtgacatcatcaaacgtgccggatagtcgagagtgtgatgtaagagagctgtgcctgaagtcagatgggaggtggagacaagtggagggaaagctgcagcaggaagagacccgcaacctgtccctcagacctccgaccccgcagacccgcatctataaccgcacatgaaaatcctcccttcattccgcagggtactcgctttttgcagggaacccgcgggtacccgacctgctgcaggagtctacttcatatttccatgagccaaacatattgacaagtcagtttatcatcatggagatgaataaactcctaaagtaaataagtaacacaataactgacttatgttgtcagggatttggtataaaagtagaacaccttaaaaaaaaaaaaaaaaaaaaaaaaa

SEQ ID NO: 512 - DNA, 1768 bp, Xenopus laevis
cagccagtgcgtgcgtttcagagggagcattatccggcgcacatcacaagtagttgctttacgtcaaacatggctgctgaagagaaggatcccttaagcttctttgctgcttatggaagtagcagctcggattcggacagcagcgacgaagagaaagaagcagagaaaactaagaaccgcgcaacaaagcgaccttttcccacagaaactaaaaagctgccggggccggacgaactgttccggagtgtttctcgccccgccttcctctacaacccactcaacaagcagatagactgggagagtcgggtgaagcgggccccagaagagcctcctaaagagtttaaagtatggaagacaaatgctgtcccaccaccggagtcctaccaagtagccgagaagaaagctccaccccctgaactggacatggctatcaaatggtcgaacgtgtaccaagacaacggtgatgatgcaccacatgcaaaccaagctaagtgtctaccagaggaagaagctcaagaagattctccaccttcggatgatgagcaagagaacgccacaaaaaagcataaagtctaacccaggctgttttgggattgatctatctgaaggcgggagacctagacctacaggaacatgaatgctcaaacaccatgtttcaaatgtttactggaagaactcttattactgtgtttgtgaaatccacttgtattcgtaaattctacactgaatacatagatataaaagcaaaaataagaatgtttccatagaaatggatgtattctagcagtaccacacacatttttaatgcaggactgcagtatattgatgttggtaattgtacttgtaaagagtctgccacctagcgatattttgttctatgaactaatgaatatgcagttgttactgcttgcttttcaatactgtgctagaaaccttttataaaggactgtttatgaaaccctgcgggaagttcacctttcaaacacttttctatttaatttagtacaccagaaatcgtggtccttatttttaaatctttttctaagatttttaattttcattgggtgttaccaactgtttatatcttatctgatagatttttttataaccaccgttgtacaaggtcccaatttcaggtgtactatttaagaactaacaaaagtggttttggaaggctaactatccattgtaatataagtcgttattataatggtaccatgtggcaattttaaaaacttattttttttgtaaataactgtaactacatgtttcagctgataaaagctatacaaatagtatattcaagtgtataattgtgtttctttcccaaagatatttttatctatagatgtatgattataaaaatgttgtcccagggccaggtgcattatataaactaatgatgaattaaaaaatatatttcctgagtaaattaagagtatcgtcatgacatctcatgacaatttaactggtggctataattattctttattgatatagtgcccacatatttcacacagagattatacatcgttcacataagtccctgcaccagctgagcttacagtctaagtctttataacatcgacatgcacagtggtcaattttatgaagaggcaatttgccttataaattcttgtaatactaacttatgtgtataattactgtatattttaacaataaatccatttataggaaggtttaataaatgttttttttctcctttaaaaaaaaaaaaaaaaaaaaaaaaaaaaaaaaaaaaaaaaaa

SEQ ID NO: 513 - DNA, 820 bp, Xenopus laevis
gccgcggccatggaaacctcaagacgctaggccttaagttgtttcttccgctaatgctgcagcctctggtgtagtctcctatccagcactcctgcccgagaccgcactttcatctaacacacggaccagactccacctataccttgtcatatcagcaagcgaataacatgtttaaggcgaaagtgctcgttattgggcccacagagagtggtaaaactgtattggccaattttatatctgatgcaacagaaacaataggcggcgaatacaaccccactcaaggtaattctagaatttgaatgtccaaatggaaataaaggttcctcatgtgaagtggaactttgggactgtgggggagatccaaagtttgagagttgttggccagcgatcatgaaagactcacatggcgtgatcattgttttcaatgctgacattcctagtcatctcaaagagatcgatatgtggcactccaactttatccagcagcagcgattgcaggaaaaccgctgtcttctagttgcacataagaagcctgggtcaggggacgaaagagaacatctaaatttatctccagcccttgctaaattaacccgtatatattccaatctggaagatgaccctgaggatgtaagaatggagttaatgaaataccttcgagacattgtcagttcattgtcggagagcagagaccaggaggaaatgtccattataacataaaatatgttaaaaatctgcatcctaaataaatatttctttttgtaaaaaaaaaaaaaaaaaaaaaaaaaaaaaaaaaaaaaaaaaaaaaaaaaaaaaaaaaaaa

SEQ ID NO: 514 - DNA, 3093 bp, Xenopus laevis
ctggaggagggagagagacaagaaggagctgtagcagaaggggggcacaggaggtggcagacacaacagcacatggtgcagtcatctcaggcaccagaggatcaaggacagtattcctggtgcatgtggctctcagacatgtacctcagctgaggctgtaagagggtgggcgagctcagggaggtgtctgggctttcctgttggggtttcacctccagacaaggaactgactcccctgtagggagagcaccgccccacagctggcaccatcagggcatgcccggggtgggcacggcaagctggccagcattttcccttgctgtctgaacatgggcaacatctcctctaacatctcctccttccagtcgctgcacatcgttatgctgggtttggactctgccgggaagaccactgtactataccgcctcaagttcaatgaatttgtaaacactgtgccaacaatcggcttcaacacagaacggatccggctgagcaatggggcagcaaagggcatcagctgccacttctgggatgtggggggccaggagaagctgcgaccactctggaagtcatacagtcgttgcacggatgggatcatttatgtagtggactcagtagattcagaccggctggaagaagccaaaaccgaattgtacaaagtgaccaagttcgcagagaacctaggcacccccctcctggttattgcaaacaaacaggatctgcccaaatccatggctgtgtctgatattgagaggcaattggcactgcaagaattgagcccttctaccccataccatgtgcagccagcctgtgcaatcatcggagaggggctgaccgagggcatggacaagctgtacgagatgatccttaagcggaggaagaccctcaaacaaaagaagaaacagcgataatgccaggtgttgagctctgggtgatgctctgccaaagatgcctgtgaatacaatatatatgcccacacgatggccactaggctgcctatccatctgaaatctacttggcctccaggggctccatataatgaggactattgggcctgtattgctggtttattgacagattattgctaattattgctccttgggccatcaggaatgactgggcccagtacggttctaccgtcaatgaaggctgctctgttggtcaacgtggcttgatcacatttgagctcatttgaatctccaatggaatattacggatcaaacttaataaactcaccgttttcttttctgacccaatgaacagtatgaaagaacgttctccttgcactgagtgacatgagctggaccttgtttcaccagtgggacttgatttaacctttgtcagggcaggaccctgctgttaacctcttccatgctgagggagactgttattgcagtgcaatatgctggcaactcccccagttacaatcatggattaaaatcttatatatatatatatatatatatatgtgcgtgtgtgtacagccaaggattacctgctgtaaggacaaggacatgggaatgaattgaagagggactacttctgtattttggatgacaaggggcagacatgatgtatttttttttttttttttttattgccaaattgaaacttgaaaatgtcaatttaatggtggtgatacatttaatggggactgatacttgtgtcactgtcttactgtctactgtccagtgcttgagctatacagaatattgctttctggccttagctgttttagtcacatcttcctacttatggcatctgtggctggtgttcatgtggctatggattgtcttcctgtttcctcttatttcttccccctccttctctccttctctctctttctctctgcaggccaaagattcacagccacgacttctacatgtaaccccttccatgctggaaagtcttgtgaatacagtgtaagcctagcaagcagggataggggatgtgtcctaatatcttcctatacttatttctgttgcatgggattaacattaggactctctgttatttctgcattctctgatctgcatatagttgtacccaatacgaatatgattattgattttgaatgatttctgctcgtcttgcctgcgttttaattcttcttttacatccattcagagcattgtgttgaacaaagccgattaatagcatactgtttatttactgattttattatagagatatgtttagggtcttgatgatcaaggggccctgacaagaattctggggcccaagttgaagggaaaaatgactgtgactcgggaatatgcaacctcagtcagctcccagcacccttcagcagtctttgtctgttggtgacttgctgggtgttgcagatcaataacaaaccgatagcagcaggtagggggcttccagatatgtattaaataatatctatagaatataatttatcttttgctccttagtcagcattaatccctcaaggggctttgctgatgccaagcactcaggacaaatgccatctctgtcctaccctaaggctacgggcaaactgtgcatttctctgctaacgttgatacacaatccgctgcgttttgccccattcctgcaaatggagtgataggctcagcaccagcctgttaatgcacatgtggtgcagattttggcatatgtttctgtgttgaaacctgccctgtgtgtgtgctgacaggctgctgccatactgcagtaagcactgatatgtctatgccaacagagaatacatactatgtggcaatagcctaaaaccaacccttttcataccaatatgctgtgtcggagctaaaccagttcccacaattagcccttcatattcctgcatttgactgtattgagactttgtgttgccaggtgaatgtgctccctgctcccccccccccgcctcatatgttcagctaatttaagcaatgtcaatgatctgtctgcttgtctccatttgtcctgactcagtccaatcagacagtgtcagtggtcagcctactgtgttcccatttccatatgtccaactgcgtttacacttttacagatggtgaataaaaaaataaatgcattttacagtaaaaaaaaaaaaaaaaaaaaaaaaaa

SEQ ID NO: 515 - DNA, 2755 bp, Xenopus laevis
gtcctaagggctactgagacttatctactgtaaaggaactgattgcgagagggctgctgatgaatactttgtattcccgcattgggctgttggacgccagcaatgccagagaggtcaaagactcttgataagaaaacatgacaagctatttttattttctgtacacgcttgctctgttttaaacttcttcaaacatttttcagaaacagttttcaaaaatgacaagtctgtttcgcagaagtaacagcaatgggagttctagaagtaccccatccactcaggaacttaataatagccgtccagtgcggaggctggagtttaaccaggccatggaggattttaagactatgtttccaaatatggagcatgacatcattgaatgtgtgctgagagccaacaatggagctgtggatgctacaatagatcagctgcttcagatgaacctggatgatggtggctatgacaacagttctgattctgatgacagtattcctccagagattttggaaagaaccttggagccggatagctctgatgaggaacctcctccagtttattcccctcctgcttatgacatgccttcatttgacagatcaaatccacaaacaccacctactcctcctcctaggactgatgtgttgatgagttccagtggcccacaagtagcaaaacggtgcagaagatggaatcctcctttagtgggcaacctaccagatgattttctacgcattttaccccaacagatggatactattcagagttcccaaagtggtccttctaatgttcactgtgaggatgccaaaaaggaacagcaatccatggaccaggaaaggaaattaaagcagtacctggaagatgagcgaattgccctttttctacagaatgaagaatttatgcgggagcttcaacgaaacagagaatttcttcttgcactcgaaagagatcgtttgaaatatgagtcaaaaaaatccaagtctaacagtagtcacgtcaataatgatttcagctcttgcccttcaatatctgcaggtgaattccaggccatttcaggaatttgtgactctaacagtactgtatctgaagatgccttatttagagataaattgaaacacatgggcaagtctacaaggaagaaattgtttgaaatcgcccgagctttttcagagaaaacgaaaatgaggaagtcgaaaaggaaacatttgctgaagcatcaggtccttggaacagctgcctccacagcgaaccttctggatcatgttgaagttcattcatgtgatgaagatgcgcagtcaaagtcgagacagcagaaccgtgaagaaaacgaaacactgaaaggacaaccaaagtcctaactccaagtccttggtgactcaaattgcttatcacagccagaggaaagagatttggatttgtgctgcggttaccttttttttttttcccttttggacaaatacaaggcacaattttttaatcacatattttaatatttaatgattacagccaaacctcaatatttgtagcaatcatactgctgaaatatagtggtaaaatggcaacagattacttagctcattttcatcttcagatactacgatcattttgtattttattttgtctggaggatgcttcctctttatgtagaaaaacacattttagggaaatttctgtgcacaacacaaaaagctgttgatttactttttgaataggaaaaaataaccaagtgcaataaacataaaatgttatgttatatgtttgtaggggacgaatcacttttattcactctttatctaattcataggcttgcaaactgcggggctgcccccttgggggcttaattgggggcactcagcccgatggtgagatttgtgttgcatatgtatctgccttacttgttagctgtgatgcggtagcagtgtgcctgtcaacagtattttcagacatctgtaatcttgttataagaaaaatggggcctgaccaaatgttgaagctcaaaggatgaacttcaaatctaataatttgaaaccttttgatcagaagtgtgtccatgatgatacaacatccttcatgctcatgtctcgcatcacaaaactattcacaagtgtaaagggagagagcaaaagaatactcactcaagtagcacaacaattactgctccctcccttataagaagaattcaacaaagattttttttttttacagcattataagatttttatatatttttttttttaacaggtttttagtgcaggataatatgtttgtattattttaatgataatagttaagactaggttttacttcacaggccatgtattgggttccagtgtgcaccacagatgtatcttttggctgtgcaggcagcctgtagtggagaaggaaatcgccttttgcatagtaaggtagcatataacattgacattggttagaagaattcatttctggaaaagcttagcctgtttttttttttttaatttttataacaaaagaaggtactgtcattttctttaacaatcctttaaattataactaaaaacattttgtgggtatgaacatgccctaccgtataaataatgaaatcacctccgacatatcttgtttttttctaaattaaaataatccattgtaaaaaaaacgttttcttttgaaaggggctcaaaatgtaaaaaaaaaaaaacatgtagttactatatattttgtactcatggtaaaataaaactgaatgtttattataaaaaaaaaaaaaaaaaaaaaaaaa

SEQ ID NO: 516 - DNA, 2432 bp, Xenopus laevis
cctacgtgtgcagccgtcacaatcataaatacatatataaagctgccttcgatttcattggttccattgtgtgtccatcgacgggttagtcaccgagaagggaaggaaaccggcaggttaggttgcaccaacagagcctctgcgaatgggcgggctctaagccgcggcctgctgtcacgtgacacggttttaatgtttacattcgaggcggtcttggggataccttgctggacggggtcccgtttcgctttcatttcccgagagcagacgcaaagctggcgggcggcgggcttaatgctggctttggaacactgacagaaacgaggcctgggcggggggtgggagacccgccttatctgccgcccgtaaccaaggcatcgcgcggagccaacatggaggagctggccgtggaggtgcggggctccaatggagccttctacaaggcgtttgtgaaagatgtacatgaagattctataactgtcacttttgaaaacaactggcagcaagagaaacaaatcccgttccatgatgtaagatttccaccgccgtcggggtataataaggacataaatgaaagcgatgaggtagaggtgtattccagagcgaatgaaaaagagccatgctgctggtggcttgctaaagttagaatgataaagggtgagttttatgttatagaatatgcagcttgtgatgcaacttacaatgaaatagtcactatagaccggctgcgatctgttaatcccaacaagtctgcaacaaaaaactcttttcacaaggttaaactggacgttccagaagatttaaggcaaatgtgtgcaaaagattcagcgcataaagattttaaaaaggctgttggtgctttttcagtatcgtatgattccgaaaactaccagcttgtcattctgtctgttaatgaagtaactataaaaagggcaaatatgctgtgtgacatgcatttccgaagccttcgtaccaaactctctcttatgttgagaaatgaagaagccagcaaacagcttgagagctctaggcagttagcctccagatttcatgagcagttcatagtacgagaagatctgatggggcttgccattggtactcatggtgccaacatacagcaggccaggaaagttcctggggtgacagcaattgatcttgatgaagacacatgcacatttcatatttatggagaggaccaagaagctgttaagaaagccaggacctacttggaatttgcagaagatgttatacaagttcctagaaacttagttggcaaagtcattgggaaaaatggaaagctcattcaggaaattgtggataaatctggtgttgttcgagtccgaattgaagctgaaaatgataagaatatttcccaggaagagggaaatgttccctttgtatttgtgggaacaaaggacagcatcaccaatgcaactgttcttttggattaccatcttaactacttaaaggaagtggaccaactgcgcttggaaaggttacaaattgatgagcaacttcgacaaattggagcaagctcaaggcctccatcaaatcgacccgataaggagaagggatatttgagtgaagactgtagtggcactgttagaggaagccgaccttacaataaccgaggccgcagtagaaggggcacaggttatgcctctggtacaaattcagaagcatcaaatgcctcagagacagaatcagaccaccgagatgaacttagtgattggtcgttggctccagcagaggatgaccgagataattatcaccgaaggggggatggacgacgacgagggggaatgcgagggcaaggcatgagagggcgtggaggatttaaaggaaatgatgaccaaccacgaccagacaacagacaacgtaattcaagagagacaaaagcaaggacatcagatggctcattacagatccgaattgactgcaataacgaaaggagtgtacatactaaaaccctgcaaaatgcatccgttgaaggcagccgactgcgcactggcaaagatcgcattcaaaagaaagagaagactgatggggtggatggaccacaagtggtggttaatggcgtcccataaaccctcggtgttgcaaataaaccctacatagtgcaaacaaaataccaagaaaaaataatctcatttcacaatagagaaacctgttaggccaaagacacatgggcaagacaatgcagggcctacatgaattgttcctgttagccttattttgttagtgttggctgtaagcagttttcagaactcagacattggaaacatatttgcattcaatatcaaaactttgaggctttcaagtacatattgcacttgacttaaaaacttaaaaaaaagtattttttgtttaaaagaaaaaaaaaataaacgaaaaaaactaaaaaaaaaaaaaaaaaaaaaaaaaaaaaaaaa

SEQ ID NO: 517 - DNA, 3089 bp, Xenopus laevis
gcacgaggctggactgttaaatggtggcagatgagcattgtgagctgaagtctgttgaacacgaggatgaagttgtacctatacctgccaaggaggctagcaggctgagtgccaatgagctggttaaatatttacaagtggatctagaaagtggcctttcagagtgctctgtacttcaacgtagaatgaagcacggctggaacgagtttcaagtggacgatgcagatccaatatggaaaaagtacctgggacagtttacaaatcctctcattttgttgctgcttggctcagccttggtgagcataatcacgaaggagtatgaagatgcagtgagcattactgtggcaatcctcatagtggttacagtggcgtttgtacaggaatatcgttccgaaaagtcccttgaggagttaaataagttggttccccctgaatgcaattgcattcgtgatggaaaacaacagcaccttctggctcgtgagctggttccaggagatgtggtgtgtttgtcagttggtgacagggttcctgctgacatcagactcatagagacgacagatcttttggttgatgaatcaagctttactggggagactgagccatgcagcaagattcatggctctatagacgaagccagcggaattgcaacactcagcaacattgtgttcatgggaacccttgtccgttatggaagagggaagggactggtcatcggagttggtgaaaagtctcagttcggagaagtgttcaaaatgatgcaagcagaggagactcccaaaaccccactgcagaaaagtatggacagactaggaaagcagctctctctgttctcattcggaataataggtttaataatgctaattggctggctgcagggaaagccacttctaagcatgtttactattggagtaagtttagcagtagctgctattccagaaggtcttcccattgttgtcactgtcaccttggctctgggcgtgatgagaatggccaacaagagagtaatcgttaagaaactgcctattgtggagaccttaggttgctgcaatgtcatttgttcagacaagactgggactttgactgccaatgagatgactgcaacaaaattagtaacttcagatggattgcatgcagaggtcacaggtgttggctatgaaggaaagggacacgtcaacctgttaccatcaaatgaagaagttcatgaattttccaatgtatctataggaaaactggtggaggctggatgtgtagccaacaatgcagttattcagaaaaacactctcatgggtcaaccaacagagggggcattgatagtccttggaatgaagatgggcttcagtaatgtcagtgacaactacatacgaaaaaaagaaattccgtttagttcagaacaaagatggatggcagtaaaatgcattgagaggtataacaagaaacagggaagatgtatgctttatgaaagggagctttttgaagaagtcatccagcattgtactatgtataacagcggaggaaggtcattaccaatcacaccacaacaaaaatctttatatatccaagaagagaaaaacctgggaatgcaaggactaagagttcttgccttggcctctgggagtgaactaggcaaacttacctttttgggacttgtgggtataattgacccgccaagacctggtgtcagtgaagcagttcaaatccttctggaatctggtgtctctgtcaagatgatcacaggagatgccctggagacagcccaagcgattggcagaagtattgggttatccaatggacatctcaaagccatttctggagaagagctggaccagattgatgagtctgcactctcgtccatcgtcaccaaggtgtctgtgttctacaggacaagcccaaagcataaattgaaaatcatcaaggctttgcagaagacaggagcaattgttggaatgacaggagatggagtgaatgatgcagttgcgctgaaatcagccgacattggcgtggcaatgggaaaaacaggcacagatgtcagtaaagaggcggccgatatgattttggtagatgacaacttttctactattatgaacgccattgaggaagggaaagggatattctacaatatcaagaattttgtcagattccaactgagcacgagcatttctgccttgagtttaataactttatcaacggtcatgaatttaccaaaccctttgaatgccatgcagattctttggataaacataataatggatggtcctcctgcacagagtttgggagttgaacctgtagataaagatgccatcaaacagccaccccgtaatgccaaggaatccatcctcagcagagccttgatactgaagattttactctccgctgccatcatcataagcggcaccctatttgttttctggaaagagattcctgatggtaaggtgacgcccaggaccacaacaatgactttcacatgttttgtgttttttgatatgttcaacgcactggcttgtcgttctctgaataaaacaatatttgagattggcctcttcaagaaccgtatgttttggtattcggtactgggatcaattctcggtcaaatggctgtgatctatatccctcccttacagaaagtctttctaacccaaaatttacatgcactagatcttctgtttttagctgggttggcctcttccgttttcgttgtgtcggaactaatcaaattctgcgaacagcgctgctgcaggaaaagaacagtgaaagtcctggaggaggagatttaagtcatgtttgctaatggtgttccccctgtataacaagttattgttgacactgtgacccatgatgtgatttctctctatgtcacttggcagcgccgtatgatattcccccagtatttatgtacagttgacactgctgtatttatgaacgaaaacaaaaaaacccccattatccagcatgattagcaacagaaagacttgcaagaactcatcacaccaacctcccatatcatcatcagtttcattttttttgtactgtataatccatttgaaaataaagactaatcatttattttttaagtaaaaaaaaaaaaaaaaaaa

SEQ ID NO: 518 - DNA, 1318 bp, Xenopus laevis
atcgaattccccgggtgaactctcttgcttttgtaggcggtgtttagctcactgggccaatcagaagagtgattgcatcgtatcctgttgtggagcagtgacagcaggaggacacggcttgtgaatatttgatccagtgcactaggtaaaaagaaaataggcaacacctgtcccatggctaatgccctctgtagcagagccagactggtgacctatgtccctgggttttattctttgataagaagggtctcaggtactcgggccttttccacagcaggatcttcaggctctgatgagccttacattgctgctacacctcctgatatacttcccaggacagtatggcccgatgagacaatgggcccctttggcccgcaagaccagcgttttcagcttccgggtaacgcaggatttgacattcatgtgaatggaataggcaataagaggaaaatagaagtcaatacaaatctgccagacttgctaaccgagcctaaaccgagcgaaagacatgaatttgtaatggcccagtttttgactgaattccaggggagtgaagtttcactgcagccacaagaattgaacactatggaaagctactttgaacatgcaaaggtggaatgtgcaatgcagtcttgcccagatctgctgaaaaaagattttgcttctatgtttcctgaaatccccggcaataatttaatggtggtaacagtaactcagagaacgacaaacgatatgacaacatggagtcaagaggttgaaaatgagagggaaattttaatagaaaagttcataaatggtgccaaggagatttgctatgcgcttaggacagaaggatactgggcggactttatcgacccattgtcaggacttgcatactttgggccttacacaaacaacaccctatttgaatcagatgagcgatatcgccacctgggattcaaagtggaggatctgggttgctgtaaagtaattcgacacagcatctggggaacacacgtagttgtgggaagtatatttaccaacgctccctcagagagtcctatcatgaagaaactgggggaacactgactttgtcaaccaaatcacaacgtgggcttcagttttttcttacttgaagaactcttaaatcataatctaaataaagaggattaaagctgcattttatttatgaaaaaggatcactaaatttaaattatgatttgttggttgcagaaaaaggtcaaaggttaaaagcaaattattcttgccattattttagaggaaagagaggaaatgacggagtaaataaagtttctcttaataaaaaaaaaaaaaaaaa

SEQ ID NO: 519 - DNA, 2435 bp, Xenopus laevis
gtatttgttaatatgtaggaagcagatccttgaaggcattgggcataagcagaagtagctgacgtattcttggttgttgcaacatatcacttagttatctgtaaccatcaatcctgtgtagctctttgatctgtgcatgtgaccctgttacctctgccctgttctttacagagaggtgctgcaatggctgctgctgcagtgtctggtcttgtgactgttttggaatcttacagagggagagacagagtgatcagaacactatgttacagctgtcagcttctgggtggggtaatgtcaaacaaaagtaaaacggagcacaactggggaaagagtcttctcattgtgtcatcgcagctcagccactgccggacggttttacggctgtttgatgatcttgccatgcttgcgtattctgtaaagtatggctttggaaaaaaggagaaagactcgctcatcaggtggatctcgatcttcagtaacatatctgatcagctctattacccttgtgagcacatagcatgggctgcagactctggagtcattcatgcaaagtctgaaatgtggtggatggcgagcacagcactttggggaatttctctcatcctaggaattgtgaagtcactgagaaatttaatgatgctaagaagatacaagggaaaaaattcaaaggaggagcctcccaaaagccgtggggaaataaaatctcagataagatcagaggttttatgtatcatcagttgcctctctgatttgttcaacgccattcattggatgccttccggatttctctggggtgggtcctctccgacatggttggtgggtttgatggggacgatttcatcactgataggtatctaccagaccactgaggtggggagcgcaggaggtgtctgaaactttaaagaagaaaaacaatttcagggtacttaatgagcatctagtgctatatttttacactggtcagtaatgcagaacaattatgtctttcagtattgccttggtgtattcagtatcattagtacaatgctaatttcacatgtgatgttttatcatacagggaagtaccactaaaagcaaagggaaagttgctttgaatacaattgtaggtaaacatctacaaatcaagacaagtcatagtaacaaaggatcttagtgtgaatgtactatgtaatagacaaccaatctgccctttagtatatctcaggctagaactatctgacttgtttcaaagtcagaaaaatgaatgtaaacaatataaacaaatgcctttaattctacatcagttctttgatgcagcagtcttatctgactgtatagaatcttctcattaaactgcattgaatgtcagatgtaaataaaaacaagtaaatatatgacacatgtaggttcagctattacaccttcccatagatcgctgcaagacatggttttatgggatagaccaatctttctgaccaaagttcagtgtgtagttgtgccctaatcattattaaattgattttgtcagtgtttgcttttttattggtagataatactgaagtaatgtcgcatagcactaatggaaaaatgcttggtgtccagttgtaatataaagttttaactagcacccatggattccattaatgaagaaaatactgatgaatttagtagtatcagtactattgatttaactgcaatacttaaaatctctcgtggtttatataccttaatctgtatacagtatatgaggcctcaaatataaatggttgaattgaatttttctgcaagtgaaatacctatgctgtcttcacatgctccttacagtgagcaggttcaacctgctgatgtacgtaattgcacacatgaatgcaaaagaaccctggaatgtacattagtggttcaatggtacccttagctacttgcatatcgtgaattggttgctaatgatgctgttgacaccatgatccagaagtaatggaatttgcacagaaatgcagcaaataaaacatgcacagcacgcactttaacgtgggcactgatttgcatccaatttgaacacaaattatggcagaggctactgagcaggtgtcattaacacaatggaattcttggggaaatgatgcatattgggtaaactatggctgtttggaatctcattatgcagaagtaataataaaacagaaacttgtgcactacctgacctgcatcagtccattttggtggcgcaacaaatctgttgtttttttttttaaatgggttttagtagccttaagactttggggtacaattatcaaagagttaatttaaagatcacgacagtccactagagtgaatttccgccactctcaatccatttctattggatttttaaaagactatttatcaatgggtgaaagtgatagttcattctttgataaatacgcctttcaaaatcccaaaaaaaaaaaaaaaaaaaa

SEQ ID NO: 520 - DNA, 2909 bp, Xenopus laevis
caccaacagaaaaaccttccaataacttcctatgagccgcccgagagcagcaggaaggggagagtcggctgagctcggtttgagacccggggattgagctctgggagcagcggctgcagcgactcagttacacggggaataatcggcattccttgagccgcacacacaagtgatctgtaacactccatgacgtctcgggggggattgcctcttccagttgggagcccaatgaacatgatgcggggaccaaaccctggagcctacaggacccccatgggcccttaccagagaccaggtatgcttccaggctcccgaatgccaatggccggcatgcacatgggctcccccatgcttcctctgtatggtgggggttctcctatgagacctgccatgaatccaatgattatggagccatttaggaagaggctgctcaccccactgggacactcccctgggccgagccagcgtaggggagttaagcgaagaaagatggccgacaagatcttgccacagaggatccgtgaactggtgccagagtctcaggcctacatggacctcttggcatttgagaggaagttggatcagactatagctaggaagcggatggagattcaagaggccatcaagaagcccctcacgcaaaagcgcaaactaaggatttacatctccaacacgttcactccagccaagcccgacggggaagaggctgaaagaatcagctcttgggaactccgagtggaagggaagcttctggaagaccccagcaaacagaagaggaagttctcctccttcttcaagagtctggttattgagttggataaagacctgtacgggccggacaatcatctggtggagtggcacagaatggcaaccacgcaggagaccgatggttttcaggtgaagcgccctggagatgtcagtgtgaaatgcactttgctcttgatgttagaccaccagcccccgcagtataagttagaccctcgtcttgcacgcctgttgggtgttcacactcagacccgtgccaacatcatgcaggctctctggctctacatcaagaccaataaactgcaggacagccacgagaaggagcttatcaactgcaaccgctacttcagacagattttcaactgcctgcgcatgaagttctctgacattccaatgaagctggcgggattgttacagcacccggaccccatcataattaatcatgccatcagtgtggaccccaatgaccagaagaagacggcgtgctacgatatagaagttgaggtcgatgaccctctgaaggggcagatgagcaattttctcgcttccaccaccaaccagcaggtggcgctgttgtagcgaggttcattcgtattgacagcgcgtgtgtctcttaatatcttggaattaaaaaagataaattaatgtaggtgacaaaagtgcttggagtggcactcatcatttttgcattcacttgtttttaaggtttacttatcctttattaaagagactttgcactagttaatatcagcagcagcatgccttctgtgacggagaagagcattaaggagcttgctgctcatttagcctttaaacagtttcctattctggaatgtttttggggacaggaactggggttgctgtgaatgtgtttaaggggcagccgggttgcagcctatagccatatgtttttgtttcctcagggcaattttcctttttttttttttttatctatgcagaaaacttagtataggaccaaattcacatcatcgcgcttttcggggttttgaaaagagcaagtaacaccggtaaatgaaaatatgcacggtcttcatctttaaaagtgtatttttctaaggtttcgcagaagacaacggccaatttgccacgtccaggacttaaaaatatatgggttgggccaatcaactcaatcgtttactggtttggtgtttacttttcctttaacccagataagaacgcgggtcgtagatgttctacagtttctattcgcttgttaagatttattgttggcagattgtagtacagatattgccaacttactgaactaccccatatctgatactgatgctgggaattatgttctgcagcacctgaagtcacccactactttttttttaaaggatgagtggggctttggaataagtgaatgtaaaactgatgaaagtcctattctgggcacttttgtaatttacattcattattcatcttttgatttgaagatattgagggatacatgtgctgttgatgtggatgagtttggttgcggcggcgccgcctgctggtcggtttcccaccggtctgaccgccgggtggtcgggggggttgtcgggagaggggggggggctgctctggtgttcttctgcttgggagagatgtgagaagggttcttctgcttcggaataaaattagaggcctttctcgcgtctttcctgggcggaggagcatcggagcagcctctttctttctcctggcggcttccttgactgcttggtggtcggactggtggggggctggccagcaggtggcgctgttgtaacagttgattcatgttggcagcgcatgtgtcccttggtatcttggaattgaaagaaaacaaatcatgaatgtacattgcaaaatttcttagaacagtcagttttacattcatgtattttgaagttttgcttatcctttaaggatctcaaaacaatctttctgggtgtccctaccccagccatgattatacctatgctgtttacagacacagagcttggggagctggggctgaatgtacttcattactaaatgtttttgttggcacaactgtttcaatgtgtaataataaagttttttttaaagttaaaaaaaaaaaaaaaaaaaaaaaaaaaaaaaaaaaaaaaaaaaaaaaaaaaaaaaaaaaaaag

SEQ ID NO: 521 - DNA, 1367 bp, Xenopus laevis
ccagacctgtagtaacttccctgcttcgggaacagacaccaccaggacaagaaatattaagacgattagtaatgtgggcttgggctcttcttcccatttgtctgactgtatgggccactggaggaatatggatagtgtatgccatgtcagtgagcaatggttctgtcaatctctcagatggttttccctatatcagtgtatctggcacataccctccgcagagctgcgtatttggacaagttcttaatgttggagcaatgctagccgtctggatctctgttatacggtttcagcaaattagagattacaattgccactctgtccttaattctgtgagtttggcaactggaatcctatgtgccttgggtacgtccatagtcgggaatttccagcaatcgaatcagctgcagacacacttagctggagcttttttggccttcattattggcaacgtctacttctggatgcagacagcgttaacgtacatggtgaagccgaagcatggcggatgttacattggaccaatccgattttgcctcagcattgcttgcacagcattaatcgttgcgatggctgtgttcctcaagatgaacatgaaatcagtatctgctatatgtgaatggattgtggcgatgattttattcctcctttacggattgttcgccgtggacttttggcatcttgatggacactttttccacgtcaagaagaggaggacagttatcccaaatgaaatggaggtctccacggtcacattaagtatttagccatctgcgtcttctactgttgaacggatggtcagcacaccaacagcattaaagggaattaatattacaggttcaagggcctggcaaatagacttttatagaagaatccaaccatcagatggcagtggccctaggaatctatttgtaaaacatcatcattttcatacagtttggcccatttgacccattatttggaaaaagttggacatcaatagtcttgataaattttaaagcagaaacaatgatcaacctcaacactgtatcacatcaacactctaatgactgctgtagctagggttgtcatctggccggtaaaaataatggatgatctcaatgttattaatagggaaaaaagataaatatatagaaagtctagcattttgttccagaaaaggtggcaaccttggctgtagggcacccagtgagaccttgttcagtgcatgtatattgatggagatctgggatagctttaaacaacatcattgtcccatgtgagaatggtccaagtatgacatgtggaaagtactaaacattgttttggaaaatataaatatatttttcagataaaaagtggtattggtaaaaaaaaaaaaaaaaaaa

SEQ ID NO: 522 - DNA, 1135 bp, Xenopus laevis
cccagctcatgctgataaagcccctcttcttgccacttgcttattattagttgtttgttttttgttttaattattttaacttaaacaaagcaagttctttattgatttatcttgatacaatgatgtccaatccctggagggaagataacccctgcatttttttcagttgatagtaggattttttttttcagttgaatattaaactggtgcaaagagtgccacatcataaaaaaaaaaaaaaaaaaaaaaaactctaggcctaggcggccggaattccgaaagacatgtccgcatggaaaaagtagaaaaggtagagccaccaacaaaagctgctttgaagccaaagcacaaacaggtgaaagtgaaagcagagccaccacccaaaaagaggaaaaaatggctcaaggaggttgcatcatcctctgattcagaatcttcccctgaccagcagagtgaagaagaacgtgttcctgtaggccgtgtattaaacacacgagccatgaaagagatgttccggagttatattgaaatgctggtcagcacagctttagacccagacatgatccaagcattagaagacactagtgatgaactttaccttccacccatgagaaaaattgacggcattgtgaatgagcacaagaaaaaagtgctaaagaagatctctctcagttcatcatttcaggaggcaatacacacgttccctcagcttaacagtgagccaggagaaccttcaaccagaatgaaacctgggggagaagcgtataaccgcaaaacactcaacaaattaaaaaagaatgtagccaaaccacaggagtttaaggtggatgccgagaagtcacttttttacaccctgtaccattccctgcatcactacaagtatcacaccttcctccgatgcaagcaagagaccaatgcaatagaagaacagaatgatgacctgggacaggaggaggtggtgcagcaatgcatgaggaaccagccatggctcgaaaaactcttcgactcctttatcgacctaatcacgcaagcacagaacaagtgcgcgtgaactagcagcgtggagaggaatactgtagaacagactaaacaagacaatgggattcagattgtaaaagagaaaaaaaaaaaaaaa

SEQ ID NO: 523 - DNA, 3675 bp, Xenopus laevis
ccaggaggggagccagagaggggtcgtgactattcctcacacggactgtgacatccccccctgagcagtgggaccggccatgaacgacaccgctcagctgtgcggccccggggaaggcgacagggtgtaaactgttttctctaaggaagccattacatgatggagcctgaaattatccgaatgtattcatcttcccctcctcctcttgacagtgtggctgacgatgatgatgaagatgagtttggcgaatttggggacttctctggagtcggtaactctggaatgggtttcgctgaatttgcaactgtcggttattccaaaacccaagaggaatttattccagctaaacctgttttgcctattcaggattactctgacagtttgaacaacttcactagccttactgctgtcaaagacacggagaacatcttggagactgattcaaagaaaggacaacatggagacgtagacacacatggaagttatgaatcaaatctgtttaatgttcctgcatttgatgataaaggaaactccggagagaaaataaaaaaggctgatttgtattcaaactttgtcagtcctgtgtcttctggtgatgataccgagttcacaagcagaagccttgattcactcaatgtcacttgtaatggtgagaaggtgcactctgaggagaaccttacaaatggctttgcagcaggtgattctgttaatcctcagggaatagaagatcgggacagcattgatgattccaagggatataataccattgctaaccataatactgacccaagcagtaactttttaaccagtactgcagtggactttgcagatttttccacattttcaaaaaaagactctatacatttagggggcacagagcttcagtcacacaaaggtatatatgaagggcaagatttaagtattacaagtagaagtccattaagtagtgtagaaaatggtagcccccaaataaaggatgtagttacacctatctctggaaacggggatggaattaataccttagttctttcaaattgcacttcagaaacaggactaatcatagccaacaatgttgcaccccatgacaatgttgtgattgcaacagacattgatgctgctgaaaaaactcctgtaccattagcagccacggaggaaaccattggcaaacttgcagacggggaggtgaatgaagaagtgttagaaaccactgatgagcacggttgtacctctcataataatgcagtcggacgcacagagaatgttaaacaatcaacgagcagcatagataatggtgagcatagtctgacaatcgacagtagtgtgtctgaagctccttgtgcaaattcacttccatgttttacagactcaagtgactccaataacacctcgaatggaatgtcggatgataaagaaaatgatttgagtgataatttgggggattttaatgagaccaatgcaaccccattccaagcggagataaaaccagctgtggatgaacagttgacgttttcaggccttggtgttaaatgtcccgaggcagataaagaggaggagtttagtgagtttggagactttggttcacttgcaaaagatgatgagcaaaatttgcaagactttgatgattttgcagactttagctctgccactaatattaaacctcattcagattggaatgcttttgacgatgaccattcagaagggccttcatgggcagtgtttgtagatgaaaaggactctttagttccagactctgagacctggacttcacataggacagatgtacaatctagctctggagagtgggacgttaaaacagaaaatatcaatttacccatattcccggagtctggattaacttctgtcactgatcaatcaacagatgcctttcagcaatcgttacagagccgttttgatcaagtcatccaggtttgttttcctcttcctcctctttttcaagtaggagaaaatatatcctgcttggatcactggcttaaagtagaggcaaatgaagaagctgcaaaacccatgcctagcataagagaagtgctggacctctgggctgatctgcaaaagatccacgatgcttacggactaaaataccagtggggcggctctcacagcaacaagaaacttctccgctcccttggaattgacacaaggaacatactttttacaggcaacaaaaagcagcccgtcattgtacccatgtatgcagccagcctgggtatgctagaaccaacaaagcctttatctgctgctgaaaagatcgcatctatagggcaatcttctcctgttcctccagaagaattaatctgtactactgatcaaatgcaggaatccctcccacctgtccagtttgactggagtagcagtggccttaccaaccctctagatggtgtggatccagagttatatgaattgacaacatcaaagctggaaagtgttggcaccagcagcaaagtaacagatgcatttgccagactcatgtccacggcagagaccacaagcacatccacaagaaagcccaggcgggatgagaaccttagtgaagaagctgcgaaggtcatcgccagcctcccggatttatcattcatgtacgccaaggtgttaatgttcccagccacactaacaccttccacaagtgctccggtcaaggccgactgagataagaagaatgtctttgggagagaaattttccagaatcacttggatgttttatatccaaactttttaaaaagtgtaaaacgaataagtaaaaagcgttgttgcttttttttttcctaaccgtgaaatattccgaagaaatatcggcgagcagcactaaaaggtatatacattttcatgtatacttaaacactgaattctacgtttctatacaaaatcagaagagaatttgtatataatggcgacgtgtgaactttttttttaatgttaggtaatacactgatttattctttcttataaaatgaaaaacagacaaaatgtgaacctagaggccccacattcactgcctgtgttgtctgttctcacatctgactgatgcttcgaagcttctccccaaatctattgatgttaatgttacatttgcaatgtccagtgttttgtgtgtcagttgtacagggggtctgaccctcccataaagggacatgtctcgtattgaatgccagtgcattatgggagcagcagggctttgtgggtatgaccggtgcatacgttttgtttcttttgctgctcgattttatgattcagaacatatcgtgttccccatccacccggcatcccgtgtctctgtcctggtttgtttctgttacaaatgaagatccttataaagtcgattagggggttctgaactgattctgggtgatgagggaccaaaaataatatgaatgtgtttgggaggaatactcctgttttgtgtctgttgtaccactatctttctgatttgcacagtgtaaagaagcataatcataggtcgctatggttttaggctgtacatacgtacacaagaatttgggatgtgtttgtctgggaaaattcctatggaaaaaaaaaaccattggatctgtaacaacaaggtctaagcgcatggccaagttctttacaaatgtaagcgtgtacattttcttttagcttacacacaaataaaattatttaaataacaaaaaaaaaaaaaaa

SEQ ID NO: 524 - DNA, 1822 bp, Xenopus laevis
ggaagcagcatggcggcgacgcgggagcagagcgcaggcgggagtacacagggagggaagaagtaccaagggaaggggcgggctgccaaagccttgaagtccttacagtttgcgaatcctggaaaacaaacagagtttgcaccagagacaagcaaaagagaaacgagacgcctgcaaacaaaaagtgctacctctaattcagggcagacagctgcttccaagaataaagtgtacgacagcaatgggattcttatttgcaacgggaaggatctgtgcgactgcctggatgaagattgtatgggctgcttctattgctgcaaaaaatgtggctccaacaagtgcggcgtcgaatgtagatgtgaccgaaagtggctttacgaacagattgaaatagaaggaggcgaaacaatccgcaataaacacgtcagttgagtttgtcacgccgcttgctctgtttacaagtccaaggctcatggtcacctgaaatctctcaatttttattccttacactgaggcttggggcagtgactaagactcacatctatacgaggctgttactgaacttgtacccgatattaataacctacatttgctggcagatgatcatgaaaccgattagcttcattatatattatgttctattctaatgtcagagttttatactacaggagccatggactgcagaaggcctaacactacggggcagatttatcaagggtcgaatccaaaattctaattccctagttttttttttggtaaaaactgtcaaatttgactcaagtttttcaaaaaatgtaattttcgagattttattctggttgtttaagaactcaaattccactatttgccacctacatcctgccaaattgctgtttagtgggagacgtctgggatcaatttggagttgtttgcagccttcctgactttttttgggaagaaaaactcgaatcgagttttcaaagttttcaggtcgatcctattcacctgagtttaaataaattagatttttataatacatttcgataggtcgcatttcaagttcatgggaattttaaaaaaaaacgcacatgaattcgaaattcagcccttaataaatgtctctaggtcaggaatacttaacctatgggtcagacccacaactaggactccattgtagggattccgcctttttcaacaggattcggctgaatccttctgcccggccgaactgaatcctaatttgcagggagggaaatcgtgtgactttttgtcacaaaacaaggaagtgaagggttttccccttcccaccgctaatttgcatatgcaaattcggttcagtattcagccaaatctttcgcgaaggattctggggttcggccgaatccaaaatagtggatttatgtttcccatgtcagataactactaaaataagacgcataagtatattctaaagcaattattgggaagaaaaaaaaagggtaagaaagaagcaagatttttctctctctctcactataatattctctatagataaaacaataatcccattggaatgtgctttctatgtcgtcttgtttattaatatattcttgtgttcactcaggtggttatattgcagctaaacagtgacgttgcttttgtagcgatgtgaaggctaaattaaaaaaggacatttcattgggtgcagagaacattgtttgtatccggatccagattctattctggttttctatacactgttcatatgcctttttatatttaaaagaaattctttatttctgtattttgttactgtgcaaataaaagctaacatgctcaaagcttaaaaaaaaaaaaaaaaaaa

SEQ ID NO: 525 - DNA, 2154 bp, Xenopus laevis
cggataaatgatggagcagggaaggtattgcacacactgctctcaggacagacttgggtatcctacagaggcatcagatggcagtactggggcacttgctgaagggctctgcccggctagagggcttagccaggggtttccaccagttccccaagattcaggcagctggacaggcattggagcaggaacaagcggagggagagttgggggccagagccaaggaagccccaatgatgaagagccttaaggacatgcccggacccagcaccctggccaacctggtggagtttttctggcgtgatgggttcggccgcatccatgagattcagcaaaagcacacgcgccagtatggccggatattcaagtcacactttggacctcagtttgtggtttccatcgctgacaaagacttggtcgcccaggtgatcagagcagagagagatgccccccagagggccaacatggagtcctggcacgagtatagagaattaagaggccgatccactggactaatttctgcggaaggggagaagtggttaaacatgcgaagtgtcttgcggcagaagattctccggccaagggatgtggccatgtatactggaggggtaaatgaggtcattggtgacctggtaaagaagatccacaaactccgagcccaggaaagtgatggactgactgtgaccaatgttaatgatctgtacttcaagtactccatggaagctattgccacagtcctgtatgagtgccgcctcgggtgcttggatgacataatccctcagcagaccaaggaatacattgcagctctggaactcatgttcagcatgttcaaaacaaccatgtacgccggcgccatcccaaagtggttacgcaccataattcccaaaccgtggagagagttttgcaggtcctgggatggactctttaaattcagtcagctccacgtagaccacagattgaggcagattgagtcccagctggataaaggggaacaggtacaagggggagttctcacacaccttctgctatccaaagagttggacttggaagagatttatgccaatatgacggaaatgctcctggctggtgttgacacgacttcctttactctttcctgggcaacatatctgctggcaaagaaccccagtatccaggagagcgtgtatcagcagatcgtgcagaacttgggaaaagaccaggttcctaccgcagaagatgttaccaaaatccccatggtcagagctgttgtcaaggaaaccttgagactcttccctgtcttgcccgggaacggcagagtgacacaagatgacttggttttggatggatatttaatccctaaagggacccagttggcactctgtcattattccacatcctatgatgacaaatgcttcccgggagcagaagagttcaaaccggagcgttggatacgcagtgggtacctggaacggaaggagaactttggttccatcccatttggcaacggaatccgcagctgcattggccggagagtcgcagaactggagatccatctgttgctgatccagcttcttcaaaattttgagatcaagttgtcacctgaaacaatgactgttctcccaaaaacccatgggcttctgtgtccaggggaaaagatcaacgtgcgttttttggacaggcagtgaaaatatccagaaaagatcccaaatacctccctacatccttcccaaaggctacggccattgagggacgattcctggggaatagatctctgtggctcccaaggactgtgcacttcccccactgattgccagatattgacataggacggacagtgaagcttctctttgtacatagatgtgtatcttttagccaatgaaactgctaacatgcactttcactgtactgcctcggccagtcgcatgcagcccagattgaaaggtcagaatttcaagaattgccttaatttcggtgtccatggccatgatggaatggctgggtgcatagagtaacactggtgtcagcactatatcactagtatttatatggtaagtctcagcaacttactctgtgcctctttaactttttctcctttttttctggagaggttaccattgatttttttttgctggattaataataaaattgtattaaatgcccaaaaaaaaaaaaaaaaaa

SEQ ID NO: 526 - DNA, 1210 bp, Xenopus laevis
gcctgagagagaaagtggttgctgacagtcagctgacacggctgatgttgcagttgcgagttttaggaggtagcgcttgcatttcctactacaaggtcaaagtagaaccagaaccaccgaaaacatgtccggagacgctgttgttacagatactcaggtatcatacattggaaaagaatgtacagtgattccaacatttctctcacagaagtatggacgtatggcaaaaagacttgatctgagtttcaatttgctaagaaccctggatggacttgatggcttcagctgcttggaagaactaatactggacaacaatcaacttgatgatcgtttcgctttcccaccgctgccaaaacttcacacattaactttaaataaaaaccacctgacagatttggaatctctcttaaatacactggcttcagtcgctcctgttctagaatatctcagcttgctggggaaccaagcatgtcctaatgagctagtgagcccagagaaagatgaagatgattatcagagatacaggtattttgttctgaataaacttccaaaactaaagtttctggatgccaggaaagtaacaaggaaagagcaagaagtagcagtttcaagaggagcctttatgaaaattgttaagccaaaagaaatacaggctcccagtagcgcagagtacagctctccagacacggcttacactccattgccatgtttatccagggatccaacaaatcacagaggagtttcagggaaatgtcactatatttactatggaaaacattcagaaggaaaccgtttcattcgtgatgaccagctctgactttcaggactatggctttcatgcaacatcagacacttgatctgcggggtttactgcaaatgttccttaactcaatcaagaaatttaagtggaatgtaaacaatgtgggaaaccatattctttgtaactgaatgcaaaacaatgttgaaatctgtgatttgtacccttgttactagagattcgtaaaatgaaaatatcacttttaaaagagaacccctcttctttaaaacagtaaaaactacaaaataatttttcagcatacatgttccttgactcaagcaagaaatgtgtgaagtggagtggaaggtcaataatgtaactgaatattctttgtaactgaatgaaaacaatgttgaaacctaaaaaaaaaaaaaaaaaaaaaaaaaaaaaaaa

SEQ ID NO: 527 - DNA, 1016 bp, Xenopus laevis
cgacacgtcatagcgagcgcgacggtctatctgatcttaagaaggacaggcaacaacgaaagagcggcaaaatggctccttcacccagtaaaaggaaggaacgctcagaagacaaggcaaaagaaagaggcaaagagaaagctccaggaaaagaagccacagataaagatcgtgggcgtgacaaagcaaagaagaggcgcagtgcttctagtggcagtagcagtagcagtcgttcccgctccagttcatcctccagctcctcttcgggttccagttccggatccagctctggttccagttcatctgcttccagtcgttcaggaagttccagttcctctcgcagctctagttccagcagctcctctggttctccaagtccatctcgccgtcgccatgataacaggaggcgatctcgttcaaaatccaaacagccaaagcgtgatgaaaaagagagaaaacgaagaagcccaagtccccgacccacaaaggttcacatcgggaggttgaccagaaatgtaactaaggaccatattctagagatcttctccacatacggcaaaataaagatgatagatatgcctgttgatcgctaccacccgcatctgtccaagggttatgcctacgttgaattcgaagctcctgaagaagcggaaaaagccttaaaacacatggatggaggacagattgatgggcaggagatcaccgcttcagctgttctgacgccatggcctatgcgtgcaatgcccagaaggttcagtccccctcgacgaatgttgccacctcccccaatgtggcggcgatctccaccacgtatgaggagaaggtcacgttcacctcggagacgctcccctgtaagacgccggtcacggtcacctgcacgtcgccgacatcgcagccgttccagttcgaactcatcgcggtgaacctgtcatcctctcgtgccccttccttcccacacccgtcgccttgacaccataaatccttctcagcaaaaaaaaaaaaaaaaaaaaaaaaaa

SEQ ID NO: 528 - DNA, 2579 bp, Xenopus laevis
ggagacacacggagctgcagtggccggagaagtaacccggggatcgtggagccatcattatcaccacagcgacgcgtaccaaaactgcctgggtagctggacggagaaaccagtatgcagaattcagacagtggttcagactcagcaacatctgttgcgcttaggacatcgacatcagcgcaagctcctgtagtgcagcctgtaccagcatctcaacaggtccagactgtccaacatgtctatccagctcaagtgcagtatgtggaaggggatacagtgtacaccaacggagctatccgtacagcttactcctataatgcggaaacccagatctacgcacccagcagtggctcctcctactttgactctcaaggaggcggtgctcaggtcaccacagtggtgtctagccctacagcaatcccttcccacagtatggtgggtatcaccatggatgtgagtggcagccagatcatctctagttctggagcctaccttatccatggaggactggagaattctcgccatacaccatctcacacttctcgtaccttccctgctacgcttgaaatggcgattgaaaatctccaaaaaaatgaaggcatcacttctcacaaaagcagcttgctcaacagccatcttcagtggctgctggataattatgagacagcggaaggtgtgagcctccctcgcagctcactttataatcactacctgcgacactgccaggatcacaaacttgatccagtaaatgctgcatcctttggcaaacttattcgctcagtgtttatgggcctgagaacacggcgccttggtaccagaggcaactccaagtaccattattatggcattcgcctgaaaccagattctcctctgaaccgtattcaggaggatgcacagtatatggcaataagacagcaacccatccaccagaaacaaagatacaggcctgcacagaagattgatggcatgggagaaaatccagccaacagtagccaacatgcatctccagaacaatctgttgcagctcaaagtcagcatcatcagcaatttatagatacatcccatgtgtttccagactttccagcacctgatttaggcagtttactcttaccagaaggcataactatgactgacataaaaaatctgcagcttatgtatcggcggcactgtgaggctacgattgatgtagtgatgaatctacagttccagtacattgaaaagctatggcaggctttctggaactccaaaccttcttctcctgatggttccaacccaatgagcagtgaggatgaacaggagccgattatcccaaatgagaagctgatggtgctttgtaaatatgaacccattatgaggtggatgagaaactgtgaccacattctttaccaagcattggtggagatactcatccctgatgtactgagacctgttcccagtacattgactcaggcaattcggaattttgcaaagagtttggagggctggcttacaaatgccatgtgtgatttcccgcagcagatagttcatgccaaggttggagtagtgagtgcttttgcacagacgctacgccgttacacatccctaaatcatttggcacaagctgcaagagctgtgcttcagaatacatcacagattaatcagatgctcagcgatctaaaccgtgtggactttgccaatgtccaggagcaggcttcatgggtgtgccagtgtgacgaaggtatggtgcagaaactggagcaagatttcaagctgaccctgcagcagcagagttcattggaccaatgggcaaattggttggataatgttgtcactcaggtgctgaaaccacatgaaggaagtactagcttcccaaaggcagccagacagtttcttctcaaatggtccttctacagttcgatggtgatccgagaccttactctgcgcagcgctgccagctttgggtcttttcaccttatacgcctgctttatgatgagtacatgttctacttggtggaacacagagtggcacaggcaacaggggagactcccattgcagtaatgggggagtttagtgactttgcttcaatgtctcctgtgcaaatggataaagatgatgtcagtgaacttgggagcgatacagaaggggatcctcacatttctggccaacctccagttaaaagagaacgcgttgaactgaaccactcaatgcaagaaatgtagacggaattttcttgccttattccctgactaatgggaactttcacctctgatgcagtctgccttgttacagtgtagtgcctcttaaactcccacaagaatccttttccccagatcatctgcagtgtctactggatggaaagaatgactcggtggcactgacaatcacatcagattccataatgccacacttcataattatttttttcttcctatcgacttccactctctaaatactgagcagtgacttggatatgaatgaatttttttcactatttatcaccgttctctttgggtgatgaatctgctcccactccctagacggactcattaaagatttaatatactgtaccataaaaaaaaaaaaaaaaaaaaaaaaaaaa

SEQ ID NO: 529 - DNA, 2022 bp, Xenopus laevis
gctgcttccagtgtggaaaggcggatctggtttccggcccaaacccgaagcatctctgtgagctgagaaagagctctcgtgccatgtgcttccctgagcgcagcatgttcagccctcgccaatggctcgtgcagattccctagagctgagaaacctaccagccggacatggaaccaggtcaccgcattgggaagaaagcagagcatttgagaatccagcctatgaggagcccacagacctcatctttgaagataatttggggcatttccatcagtgcagccccaaccctgaggtaagggggcaactggggacaggtgatgcatctcctcactcagaggacagccaggtcccggagacaccccgccattctgtggattatggtttcatctgttcccttattcttttggtcaatggtataattctggtggccattgcttacatgatcccacgagaggtacgtgtcagtccagagtctgtgagtgcccgtgaaatggagagactggagcactactatgcccgcctgggcacccacctggacaaatgtatcattgccggcctggggctgctgactctgggtggcacactcctctccctgctcctcatggtttccatctgcaaaggtgaactctaccacaggaaacaattccctgctcggggtcccaggaaaacctacggctccctaaacctgcagatgaggcacctgtcatcggatggggggcaagtactggtggaacatgaagttctgcatccgactgggaatggagcagcaaatcatcaggcatcttagtacctgctggatacaggggcagaggttacttatgagaggtctccttagggccaccaacatgtcaggcacatgctggatgcagggagcattatcgctttagtagggatttttgggctggaatagatgcccagggcatgattgtactatagccactgtaatgccattgacccttgcaattcacatgtcatcagcttccagcgccaccagcttcctcactcatatccacactgttaaaggggaagtacaacttttgggagcatctataaatacagtccctatgccgaaataaggattctgcaaaaagaggactgtatttatatttcctgctactgcacatgccccacctcttcctggcccattagcacaatataaatcatattgccagccaatagggataatgctcctggctgcattggcattaacagtgctcagccaaggggaatggcccttcaaggaaaggacccaagaactgaacttccccattaattggccatttattgttcttacggggggatgtctggactttatgttagagccatttgtgtcaatacaacttttacttccatttaaattatctgctagtatgaaggtaatattctgagacaatttgcaacttgtcttttttatgggatttgaatgatttagctggttagaattccagcagctatccgtttgctaaggtccagttcccctagtaaccaggcagtgctgtgggaaaatcaatggagccttttcagagaaatagatggtctgccctctaaaaactggaataaggcagaaaaagaaacaattggccaatctataacatactaacagttcattttgccttcaagtacacatgtgcttactaatattgcattgactaattaaatatcatacactttccaccccattaaatgtccaagtaacccctcctacttgtgataccaaggcacagcaagtaaggggcagcattaaaagatatgcagtgtttgatgccagtgtctcaagccctttatctccatttgtatttgtaggataacatgcccatttgcttccctggcccactgccccagtacaagttaatttgcaggtagaggcaatacaccataaccccttctggaggctgtgccaaggtactgagcacttggtgctacttgctccccaatgaaataagccaagaattctgtgtgtctcactgtatttatttataataaaggagaagaacacaaaaaaaaaaaaaaaaaaaaaaaaaa

SEQ ID NO: 530 - DNA, 1735 bp, Xenopus laevis
agtcacacagtgtaatgcagcagcagctctcagtctgtggatctcaggcagttcccctggctcagtggctcagtggaggagaggcacaattttgggctctggactttgttgtcaacgggattaattgtgaccagtgaacctgccagccccaaagccacaatggtggccaaggattatccattttatctgactgtgaagcgggtgaatctgactctggaagtaaagacaacgaggaaccccactaaagagatagaggaaccaagcacaaaacgggttaaacctctctcaagagtcacatcactggcgaaccttatcccacctgcgaaaccgacacccttgaaacgattcagccaatctctccagcgctccatcagtttccgaagtgacagccggcctgatttgttcaccccgcgcccctggtcaagaaatgcaccccctcctatcaccaagcggagagacagcaagctctggagcgagacctttgatgtctgcgtcaatcaagtgctcacatcccaagagatcaagagacaggaggtcatattcgagttatcacaaggagaggaagacttaattgaagatttaaagttagcaaaaaaggcttatcatgacccaatgctgaagctctctataatgacagaacaagagttaacccaaatctttgggaccctggactcactaattcctctgcatgaagatctccttaggcggctgcgtgaggtccggaagccagatggttccacagagaatgttggccatatcttagttggctggctcccctgtttgaactcctacgacagctactgtagcaatcaagtggcggcaaaggctcttctggatcataagaaacaagaccaccgagtgcaagactttctgcagaggtgcctagaatctccgttcagccgcaaactagacttgtggaatttcctcgacatccccagaagtcgcctggtcaagtatcatctgttgctaaaagagttattgaggcatacacctaatggccaccaagatcagcagcacttagaagaagctattaatatcgtccaagggatcgtggcagaaatcaacataaagaccggtgaatccgagtgccactattataaggagagactgatttaccttgatgaatgccaaaaagaccctctcatcgataactctcgagccctgtgctgtcatggggagctcaagaacaacaggggagcgaaatttcatgtcttcctcttccaagacgttttgatgataacaaggaccatcacccaaaatgaggcactttactaccaagtatatcggcagccgatccccgtgaaagatctcatcttggatgatttacaggacggggaggtgcggctggcagggtcgcttcgcggcgcctttagcaacaacgagagaataaagaacttttttagagtgggtttcaaaaatggatcccacagccaagcccactttctgcaggcaaacgacacgttcaacaagcaacagtggctgaactgtattcgtcaagccaaagagtcggtggtatgttctgggggagacgacgcgtcctcctcaaacagacgtttatcaatatcggccaatgggacctgtggttctcagccgccggcgcggtttgagaaaatggaccaatcagacagtgtttcggactgcagcatggacataagcgaaaccagcatggactgcgagcaaatggaacaaacaaactctcacaacaaggaggaggttgaaagtaatgtttgaccca

SEQ ID NO: 531 - DNA, 2056 bp, Xenopus laevis
caattgttgatcagatcacatctaagggattcagaagcacagaagagcagagatttgagtgggctaaaaaaacatcctgagacaccctgacgaatgcacacaccttgtcccttattcgtatccgagctacctctgtaaaacgcgcgcactgtgggagagggactccgcggctgaatccatttttttcttacatcagtttttacccccccccccccctgaagacatattttcaccaacccttctgtgcttgctgttgtgcacgcagtggcagcgattcccctgctggagagacatgtccttcccgcagctgggttacccccagtacctgaccgccggccagggtgcagtctatggcggcgaacggccgggcgttttagccgcggcagcagcagcagccgcagcagccggaaggccaacaggagctgagctgggcagctgtcctaccgcggcagtcacctcagtgctgggcatgtatgccagcccgtacagctctcccaactacagcgcctttctgccatacacaaccgatctcacccttttctcccaaatgggatcgcagtatgaactgaaagacaaccctggtgtccacccagctacgtttgctgcgcacactactccaggctattacccctatgggcagttccagtatggagacccagggcggccaaagaatgccaccagggagagcaccagcaccctaaaggcttggctcaacgagcacagaaagaacccataccccaccaagggggagaagatcatgctggcgataatcaccaagatgaccctcacccaggtctccacgtggtttgccaacgccaggaggagactaaaaaaagagaataaggtcacttggggggcaatgggtaaggaagatgacaacatctttggtagtgataatgaaggagaccatgaaaaaaatgaagatgacgaggaaatagacttggagagcatagatattgataagattgatgacaacgacggtgaacaaagcaacgaggaagaggatgagaaactggaccactttagacatggcgagaaagtaagtttgaaaaaggagagtgaggtgatgattccaagttccgacggacttaaaccaaaagactcattgtccctgggtaaggaatgttctgataccagcaataccagaatcgtaagccctggtggacagggcaacatacaagctccacctcacagtaaaccaaaaatctggtccttggcagaaacagcaacaagcccagatggggccttgaagtcttctcctccaccttcccaagccaatcacacatctccccaaatgcagcacccagcctttctccccagccatggactatacacatgtcaaattggcaaatttcacaactggacaaacggggcttttctcacacagagctctctgataaacatgagatccttgttgggagtaaaccctcaccatgcggctcaccataaccaccaccaccttcaggctcaccaacaatctacattgttagcaacaaacctgggttccctcagtagcgacagaactccagagaggaccagtcccaagcactcagacagagaaaatttacccagaaccgaatcaccacctcagttaaaaccttccttccaagctgttcgtgaaaagaccttttcccaacaagaaggcacctctcgtatactgacagcacttccctctgcctgacggctagaagaaattattaaagagcccttaccaaaatatggacagaactggatattttataaatgtcgtcatcctctttttgcaataatgtgctacaaattcagactaccccgattttttacacatctttagacggaccccccactttccgagtttcacttcagactctggtctgatactttttatgtttctcaagtatttgtttcattttttctctctctgtatataaagtgatctcagattgtaaatagagcgcaagcaaaaacacttgtctaaatgatatatttttgtttaataaactaaatgaaatgaaaaaaaaaaaaaaaaaaaaaaaaaaaaaaaaaaaaaaaaaaaaaaaaaaaaaaaaaaaaaaaa

SEQ ID NO: 532 - DNA, 1658 bp, Xenopus laevis
agcatggcacctctgcaatttctcttcttcttcttcctctgggttacagcaaatgcaggatcttccagcaaacccattgtgagctttgatcctaattgggccacggtattcaccaaggaatctgtaactctcacctgcaatgtggatccccctgaaacaagagaccagatctattactggtacagagacaaccagatcatcccgttgtatcttggagcaaagagtgttaaaattgactatgtgaaacaagaagatggaggaagctatcagtgtcaaacagttaccagtgttaagagtgaacccgtcacactgcaagttgctcatagttggctcacactgaaagtaccagcgtttgtatttgaaggggatgaattatatgtgtcctgtgcagggtatcctgggtattctgccagagacgctgtgttgtacaaggacaatgaggttataggatcctctccctctgatgccgattttctggttggaagagcaaatatggcaacgagtggtttgtacagatgcacccgacaagtgaaggacggtgtcatttattataattatgctagtgaagaacaaattgccgtaaaagagctgttctccaaaccagtgatgaaagtgaatcccaatcatctgacagaaggagatcacatgaccataacatgtgacacaaagctcagcccacgcagagagactacagagctacagtttgttttctacagaaatgggcacaatgtgcagggattcagcttggacaacacattccaggttccttcagtgctccttgagaatggtgggaattatacctgtgaggtcacaacaataaatgacaccgtgaggaagaggagcaatgagatcagtgtccaggtggaagagctgttctccaaaccagtgataaaagtgaatcgcaatcacctgacagaagcagatcacatgaccataacatgtgacacaaagctcagcccacgcagagcgactacagagctgcagtttgttttctacagaaatgggcacaaagtgcagggattcagcttggacaacacattccaggttccttcagtgctccttgagaatggtgggaattatacctgtgaggtcagaacaattaatgacacagtgaggaagaggagcgatgagatcaatgtccaggtggcagttgctgagttccagtctacagtgacatcacttcaggattacaaggaagaagaaagggaggtgggtcagttgccagtggtacatcctgcagagagaagcacaataggagtagaaatcactatggctttgctgatgtcctttctcactgtggggctccttgtctttgtgttcaaaagtaaagttgccttatccttcttcaaccgtcactcttacccaacaaactcagcatcagtggaatccagtggaaacaaaaaggatatgagttacaagtacatagatgtctaaccagctccaaaaggatgagaacagtgttgtttatgccccggtgaagagagataaatacctgcacgatatccacaacaagagacatttaaccttttggcttcattattttctttcctctcaggagactcagggtttattctttttcattttcttctttctttgtttttgtttaacttaaagaattcaatctataatttcaatgtgttttcctatgagaaactgta

SEQ ID NO: 533 - DNA, 815 bp, Xenopus laevis
tgttggtgcaccttgaggttggggctgtctcgctgtaggggttgggattgctgttgtgcaggctcttcgtgagacacagagaatatcgtcttcgctggtgacgaccttagtagctatgcagtgactgtgattggtggcatggaagagagatgccaattctccgtggggaaataaaccaggtcccagtcaccaaaaccagggtggatttctccgacttcttccgtttacagcccccatctacctctgagagtgggcatggtgggggagggcataatgagcttgacgaagaagcatcgacctctggaggagcctctgctcccagccctcagagcgaggcggtcacaaatgatctgcaagaactctctcttcagcctggggccaatgttcagatccccttctctaggccatgtcccaataccccgcctctgagtgagagaaagaatgtcctgcagctcaagctccagcagaggaggacgcgagaggagctggtgaatcaaggaataatgccacctctgaagagtcctgcagcttttcatgaacagaggcggagcttggagagggcacggactgaagactacctaaagcgcaagatccgatctcgacctgagcgtgcagagctggttaggatgcacatattagaaggtataaatgttgctcatgtcatttaaattttgccttatattgttctgtagccagatcctgacaaaaatcagcagcccttcttatttttttttaaacatcttttttattagttttattacattacaacaataaagaaaccataaaataacaaaaaaaaaaaaaaaaaaaaaaaa

SEQ ID NO: 534 - DNA, 3742 bp, Xenopus laevis
ctcggttcgccggtgacgcagccgccggaagtagcaacaatgagttacacagagaagccagaagagatcacgaaagaagaatggatggaaaaactgaacaacttacatatccaaagagcagacatgaaccgtctaatcatgaactaccttgttacagagggatttaaggaggcagcagagaagtttcgaatggagtcaggaatagaacctagtgttgatctggagagccttgatgaaagaataaagatccgagagatgattctgaagggccagatccaggaagccattgctctgatcaattccctgcaccctgagctgttggataccaatcgctacttgtactttcacttgcagcaacaacaccttattgagctgatccgacaaagggagacagaggcagctctggagtttgcacagacccaactggcagagcagggagaagagagccgtgagtgcctgactgagatggagcggacgctggcactgttggcattcgataacccagaggactctccctttggggacttgctcaacatgatgcaaagacaaaaggtatggagtgaagttaaccaagctgtcttggattatgagaaccgcgagtccacccctaaattggcaaaattactcaaattgctactctgggctcagaacgaactggaccagaagaaagtcaaataccccaagatggccgacctcagcaaagggacagtggaagaacccaagtaactcccgttcacttcacaggaaattctggaatatttgcctgtgcgcatcctctgtcttctcagtctgtgactgcaacatttgtactccatgcgcagcgtcagggagaaaccgtcttactccttttccttttatctcacgtctcttcctggtacaggaggaaataggctgagaggcaggttcagtcagtatttccaatctacgccggctcctcacagtgccaaggggcaattgcttaggctgcagctcctgcagggaattagtgatcagtctaactatgcaccacacctcttgttactaaaatgttgtgccatctcccattatttattgggccatctttgctgaaccttttatatccgttccaggtcttgccacacgtaactgacaataactcttcctactctagctattgcctcatgctctagctcttgcacaactacatcaaaggggaagctcatgctagatttatgtgctagagtaggtgatttatatttgtgttttctttcatctgcctgttcttgttagtgaacatgtttaacagtcccatgacggcttattgccccacagctctgtgcatcttggctgggcactgcaagagtaattcagtttattagagccaaagagttgattagacttatatctgtttgtgaagatggattttggcaggttggagcaatcagaacaatttctaaaggtaaatgttgtgcttggcatattagctgtgtgctgtgctttattgcagggatttctttctgcgtctcctggaagtcggttgtattttaattaaagaggcagagttttattgtaaggatgatctagaagaacactatccactgagcttaatgtaatactaagtctgtcccctctccaacagaggggtaatgcaggctgaatcccttccccctgtgcgtgtagagactgggacattatataatctttgttctttagtgttagccactcatactagtgttcgttacgtttgctagtgttaggtatttttgtggatatttcagtttacagttgctctttggggggggcacttaaaaggatttcagtgcaaatctgtagcaccaatggttacaaattggatgaaagcttatttagtgaaatcccccctattgttagttactgctgttagagtcgaagtcaacttatgtagtttgtttacgtggatcatataaagaaatgtcaatctcataatttaatttatcaatcgctaaggatcgtcagtgggcaaaaaatgcaatatacgcaaatgtcctcattgattgggtgtatatgaagtcataccccaaaactataggagatgctgtaacaaaccaataagtcttgttggatatcacagtgatggagactttaacaaacctgggaagcctgagtgtactaaacctcctcatgcctttgaactgctggatgatatcctaaataaagcagccctatggcattattgttattagcccccatatcttgcagatcctcttgtgcttctaggtgccctgtcaccactgagccaccgtagttttcacataacccacagggaagtgctgattacagaaccttgaatcaattgttggacatgtttttgtaccaataacgtcctgggttcttccagcatccttatggcgacactaaacaatgcacatagaatattaaatgagcgcttgcaagtcctgcagtttggcacaatgccaccttgagctgattatttaattgtttattgtacccagacatatttgagcctgtgtgtgagtgcagcctgatccctgtaatggttgtagtgttactggttttaggtttgatcttttctgtacgtgactgattgctgtcttctgttctgtaagactttgtggcctgggcttggtatttcagataacagtgagggctgctaggatgcccaatatagtgctatacctacagtacaaaactgctaatcaggcttatttttttttttgtagcttctagaggcttggctagtggtgtctggtctgctgttgaacacctaaggctatccggaagtacagtcagcagcaggttggaccttcctagctgaacggaagcagttgattttaggtcagttaaaggagaactaaagcttaactaaagaagtggctataaatgttgtacattatgttttgggcttctgtaccagcacaaggcaaacacaaccgtttagcagtaaagatctgtctctccaaagatgccccagtagctccccatcttcttttctgctgattcactgcacatgctctgtgctgatgtcttttactgagcttagggacccactcacaatatacagtacacatagaatagaaatgtcacaatataagactgattagtaattaatacagataattactacatggcagcacagaaaccagtgcaattagcatcagaatttaataatcagccctgtagcattatttatatttttattatattacaggtcaacctcattttctgctggataattagtgacaacccctaaacttagcttctcaacaactgctcagagcccactgagcatgtgagtgttgcagacactttccaaaatggtgaccccctgtgacaagtttgaagtcctggatcattgctgctattgacaagctgaaactttaggctggtgcaataagttcagtatataaaatgaaatttttagccacattcatttttagggtttagctctcctttaacccttctcctttccttatgaagtcattgggtcatattacagggcccaccattgatgccaaccatttgcaggcacccaataacccctagagtggcattaagcctgcaactgccagaaatcctttactgcacattgtggggccaatgtggggtgcacctctgtaaatatcagtttgcctttgtacatagttttacattcctgttctgcaggactccagtgtactgtttcacatctgcattatgctcgggggagaaagtttgtagtttgtggggggggggagttttgaaattaaaattcaaagagatgtgaaaaaacaaaaaaaaaaaaaaa

SEQ ID NO: 535 - DNA, 2803 bp, Xenopus laevis
ccaagatggcgtgcgtgttggagcctccgctccggatgagcgtgttatctgaggttactgcaagcagtcgtcattatgttgaccgcctttttgacccagatccacagaaagtcttacagggagtcatagacatgaaaaatgcagttattggaaacaataaacagaaagcaaaccttattgttttgggtgctgtgccaagattattgtatttgcttcaacaagagacttcaagcacagagctgaagactgaatgtgcagtggttctaggaagcctgtcgatgggcacagaaaacaatgttaaatccctgctagactgtaacataatcccagccctgctgcaaggactgctgtcatcagacctacaatttattgaagcctgtcttcgatgtcttcgtacagttttcaccagtccagtgactccagtggaacttttatacactgatgcttcggttattccacacctcatgttgttgcttagcagatcaatatatgcccaggagtatatatgtcagatttatgctcactgctgcaagggtccagaccatcagacaatattgtttaatcatggtgtggtccagaatatcgctcatttgttaacatcggtgtcctacaaagtacgtatgcaagcattaaagtgcttttcagtcctagcgtttgacaatccccaggtgtctatgacccttgcaaatgtgctggtcgatggagaattgttgccacaaatctttgcgaagatgctacaaagagataaacctattgaaatgcaactgactgctgctaaatgtctaacgtacatgtgtcgcgcaggatctattcgaactgatgataactgcattgtgttaaaaacccttccctgcctggtacgtatgtgcagcaaagaacgcctgctagaggtgcgggtggaaggtgctgaaacccttgcttacctgatcgaaccagatgttgaacttcagagaattgccagtatcacagatcatctgatctccatgcttgctgactatttcaagtatcccagctcagtcagtgccattacagatatcaagaggcaccaagaaacagggcagccttgcattgatccagaggaggcagagcccagagggactagagatgaatctcagtgcactgcactctctattagccatcctgtctcgcaaattcaacatgactgtctcctgacttctgaagagcttgaccatgatttaaaacacgcccatgaactccgccaggcggccttcaagctttatgcctctttgggagccaatgatgaagacatccggaagaagatcattgaggctgagcatatgatggaccgaattgtgaatggcttgtcagagactagtgtcaaggtgcgattagctgcagtcagatgtttacacagtttgtccagatcagtccagcagctccggaccagctttcaggatcacgctgtgtggaagccattaatgaaggtgttgcagaatgctcctgatgacatcttggtagtggcttcatcaacattatgcaatctactcttggagttctctcctagcaaagagcctattcttgaatctggagctgtagaattgctctgtagtttgacattaagtgagaatccagccctacgggtgaatggcatctgggctttaatgaacatggcatttcaggcagaccagaaaataaagtcagatatacttagaggactgagcacagaacagctgttccagctactctccgattctgatgtcaatgtgctgatgaaaacattagggcttcttagaaatctgctttcaacacgcccgcatatagaccagataatgagcactcatggaaagcagatcatgcaagctgtgacctttatccttgaaggggagcataatatagaagtcaaggagcagaccctgtgcattcttgcaaatatagcagatggaacaaccgcaaaagacctcatcatgacgaatgatgacatcttgcagaaaatcaagtattatgtgggtcattccaacctaaagcttcaactagcagccatgttctgcattgcaaacctcacgtggaatgaagaagaaggttcccaagaacgtcaagataagctacgggaaataggtattgttgacatcctgcacaaattaagtcagtcaacagatccaaacctctgtgataaggcaaaaacagcactgcagcaatattttgcataatcttggacacatcttgacttccctcttgtccctactttctcctcactgatggacaatagcctggatttctactaaatgcacacagtcaccttggaatttctttgctccacgcagcatctggtgcagacaatgagcggccacagcagaaaggactactctgtctaacctctttagcccaaagggggttattagtattattttcctatctatctatctatctatctatctatttttctgtttttttctttcttcttgtttttggagttgagctaatatggatttcttacactgttgctgcaacctttttcgtgtttgtggctaaatacctcagcccttcttttcatttcttagtagcaaacacatttaatagaatactcacaagtgcgtgggtccttcctaaaaaaaacaattccgctatcacaggacaaagaatctgccacacagataacttctatacagtttgtaaaatgttatttaaaaaagaaaatctatgtataaatatataaatatatatatatatacatgtgcaggaagataagtgcccctaaaatgtatgctcaatttttgagcatacagatttgtaagtaaaatatatgcttttctgaaaaaaaaaaaaaaaaaaaaaaaaaaaaaaa

SEQ ID NO: 536 - DNA, 1869 bp, Xenopus laevis
ctggaatacaacaaaaaaaaaagcggagatgtcaccagttgtttatgttgtggcagtttttatatatgttggattcattccggatgaagtaaaggggatatatatggataagctggcagagaagaaactttgtgctgatgatgaatgcgtgtatacactgtctcttgctagagccgaagatgattacaatgctcccgactgcagatttattaacatcaaaagaggagacctggtgtatgtgtattccaagctaataaagcaggaggatggcggagagttctggtctggaagtgtttacagtgaccaataccgggaccagatggggcttgttggttatttccccagcagcctagttacagagcttcatgtctaccaggatttaacccaagaattgcctacaacagatattgacttctactgtgactgagtggcaagtgaccgtgaagatccttaaaagaaaaaaaaatccctcaattcatattccagttaatacccagatgagcagataatccacataaagaagtatggtattttgggggaaaaaaagaagaaaataaataaatagtgcaaatataattaaaggggttgttcacctttgagttaacttttactatgatgtagagagtgatattatgagacaatttgcagttggttttcattttttattatttgtcatgagtcataaaaagtagcaataaacttgtagccttacggagtatttgtttttttagatgggtcattgacccccgtttgaaagaagtaaagagtcagaagtaaaatttaaacaaatgaataaatactgaagaacagttgaaaagttgcttagaattggccattctataacatactaaaagttaacttaaaggtgtagcactcctttaagtgaagggcagggtgcacaatctgccatgttttttgcactttgcccttctgcaggtcattgggctcaaaaatggagtgcaaagacctgcatccaccccatgcatacagtgctgcttgcattaagcagtttggtattcaagaggggctggcagaggagaagccactcctgtccactaacttactcatcattcagacgtgtaagttagagagcaacgacatattgaagccctgtacttacaagcagccctacggcaggcaaaaaggacagggttgctaaagtgcgttgcacccttcactgttgcattttgcacttaactacacatttcctatccggcactatgttcagagtgaagccacgcaacatacacaattgttttgtagatgaacacctagaagcacacttttgcaccccttactgctctagcgcttgtgtccaggacaagggcacccctatatgatgtaaggtgagaacattgcctctggcagcagctcccctcaaggcactgctgctcatcataactttaagaggtgaatttcaggttattaaacctggaaaattggctattctagtgcaaagagtgcagttgcctccaatggtctaccaccaatggtctaaggtcaaagtaaaacacctacttctttaaaaatccagtttttccagtgggtgcaactatttcacacaatattaacatatcagcagattttaacataataagctatgtttgtaatatgtcaaactttgctaaacgtatgtttaagaaaatagcttagaaaatgatagaagtgattataatatggcaaacgttgtgtagcatttatatattttatactcaaattctctgctgggttcagtttgctttttgtaaactttatatcccaatatataagtataatgacggttttataataagagcaacaaataaagctaaaaggataacacaaaatagcccttaaaatcaaaaaaaaaaaaaaaaaaaaaaaaaaaaa

SEQ ID NO: 537 - DNA, 1906 bp, Xenopus laevis
atcagagctgcagtcttccttgtgctttttctcctggagttgttatttcaacccctgaattgtatttgagggagattatttttttttaaaaaagaagtgacacaagtatcctttcgacatgggtgcagtgatgggcacactctcctccttgcagactaaacaaagaagaccctcaaaaggtcaactgtatgttatggattacatcacccaccaaaataagtcagacaaaatagaagatgagttggagatggcaacagtttgttatcgaccagaaggacttgaacagcttgaatcacaaacgaactttaacaaaagtgaattacaagttctatacagaggattcaaaaatgaatgtccaagtggagttgttaatgaagatacctttaaacagatatactcacagttcttccctcatggggatgccagtatgtatgcacactatctcttcaatgcatttgatgctgcacagtcaggatccgtaaaatttgaggattttgttgctgcattgtcagtattgttaagaggaaccattcatgaaaaactgagatgggcatttaacctctatgacataaacaaagatggaaatataaacaaagaggaaatgatgaatatagtaaaagccatatacgatatgatggggaagtacacctacccagttgttaaagaggatgctccaaagcaacacgtagaagtattttttcagaaaatggacaaaaacaaagatggtgttgtaacattagacgagttcattgaatcctgccaagaggatgacaacattatgagatccttacaactttttgaaaatgtgatgtagcaccatggagacacctgttatttattgtgaatattataaaactgaagccgcaatatggaagaacaaaaaaaaaaaagtccagttctcttgaacacaaggggattttggagctctgccattattaaagtatttaagagttttgtatgtatcctagtggagaaaaatctaaaaaatccccctggtaaaaaaagtcaataaaaccatttaaattttatatcctttttcatgcatgcctttaaagataaaaaaaaagttatttttattttaaaaagacattaaagtggacctgtcatccagacacaaaaatctgtataataaaagtacttttcaaattaaacatgaaatccaatttctattttttattaaagcattcatagctgttgtaagctcatttaaacatctcagacaattactttcactttccatttagcacttcctagaggtcactgctctccccatattcccccgttctcttcaccatttaattgtatagtcagtgcatggggatggacatcaggtcccccattttggtgcacaaacaagattctgagatgatacaagacttgccttaataaaactgtccacaaaatggctgctgcctgcttgctgtaattatgaattcccagactgaaggaaacaagattcaaataattaatatagtgtaattaaagttcattttgctatctaatgtgataaaataggatttggaatgtttttatttgggtgacgggtcccctttaataaatattttgctggtcagctgtaaatgcttctgccattggaatctaataaatttggttacaattacaaaagcaaaaaaactgataaaagtcattgcctgctttattgcaatcaggggacacaagtttctctgtctttccgtaataattttaaaaacaaatttaagacttcattaataaaaaaacaattattttacattttattgtaaaatcttcccatgatatgtacagtcattgttgtcattaaaaagtgttttgtttcattgccctttgtactgtatgatgaacagatactttattttcaaataaagcacaacataaagcttaaaaaaaaaaaaaaaaaaaaaaaaaa

SEQ ID NO: 538 - DNA, 1076 bp, Xenopus laevis
ggaggctcctcctctgtcccgcccagcgccctattcccgggatgatgcggactccggggctcctcggcctcaggggcttcgtggccttcgctgccaaactctggagcttcgtcctctacctcctccgccggcagttccgcaccattattcaataccagacggtgagatacgatgtcctgccgctctctccggcctctcgcagtcgcctcagtcaggtgaaacggaaagttctagttctagatttagatgagaccctgatccattctcatcatgatggggtgctgcgcccgacggtacgacctgggacccccccagattttatacttaaggttgttatagacaaacacccagtgagattctttgtacataaacggccacacgtggatttcttcctggaggtggtgagtcagtggtatgagctggtggtattcacagccagtatggagatctatggctctgctgtggccgacaagttagataacaacaaggcagtgctcaggagaagattctacagacagcactgtaccctggaactgggcagttacattaaggacctgtctgtggtgcacagcgacctctctagtgtcgtcattctggacaactctccgggggcctacaggagtcacccagataacgcaattcccataaagtcgtggttcagcgaccccagcgacacggcccttttgaatctgctgccgatgttggacgctctaaggttcacagcggatgtccggtcagttctaagccgcaatcttcaccagcaccgactgtggtgacagtgacccccgcccacccctctcccctgccccctttgcgcatatacagacagagactgtacccctcactgaggaaggaggatacagagctccctctttctacctcttggacactttatggggagggtggtaatgaactctaaaagccccttccatcccttttttcaggggttgggggtgtgtggggggaaggaggggctggtttttaattgcagactttcttgtataaagagaattatttcaagttaaaaaaaaaaaaaaaaaaaaaaaaaaaaaaaaaaaaaaaaaaaaaaaaaaaaa

SEQ ID NO: 539 - DNA, 1282 bp, Xenopus laevis
gtaacctggctgtaatactcttctggaaattggtatatttttgagaattgctggatagacggtgtatgaggtcgtgctggcaatgacaaacatgtggacactacttctattgccttttttcgccatgcttcaggtccattatgcttggtgttggagtcctcaagatagagtacttttgagggatattcagacaattactctgtatgctgaccgatataccaatgcccgccgctccgctcctgtgccacaactgaagtgtattggtgggaacgcaggctgtcatgcaatggtgccacaggtagtacagtgtcacaaccgaggatgggatggcttggatgttcagtgggaatgcagagtggacatggacaattcatatcgatttggtaaagtggaagtaagctgcgaaggctttgacttcccagaagatccatatgttctccgtggctcctgtgggttagagtatactcttgagctcacagaggaaggcagaaagagaacacaagatgggtacagaagtgctggctttggctcaggctatttccaaagcaattcacaaagctgggattccaaaacagatggcagcagtgcaattgttctcatatttatagtcatacttgcttatggagtgtacaagctattcctgagtggcccatcagtgcagcaacaccctcgacctgatgagtatggatatgatcatcaaagccagactcattctagtgctcctccacctggcttcaagtcagacttcacaggcttttcctcaggttatggtaccggtcatgtgaatcagggacctgggttttggacaggtcttggaacaggaggtgtattgggatacctatttggtaaccgaagagctcagccataccagtcaccatacttcaacacttggactggtccttcccattcagaatcaatgcatcaaaatgacaggccaccacagagctcaggtgtccggacagcttcaggatttggaggaaccaaaagaagatagaatatttatttcaagtgaaaataaacacaccctgggttggagtgcattttatttaattacaatgtttaaatgcttttctgattagtgctagccaatttccttttactaaaaatatgcaaacttgttttggtgctttgaacggtatgaagatgatctgaagctgttgtaccagaatactctgttatagcttgaatatcagccttggagggaatgtcaaccccccaaaaattgtttgctcaataaaagaaaatataattttaagcaaaaaaaaaaaaaaaaaaaaaaaaa

SEQ ID NO: 540 - DNA, 1429 bp, Xenopus laevis
gagaatatagaggcagtcgcaggagctcgcagtgagcggtcggagtgtagtggtgtttaaagctcatgataaaggacggcgccatctagcagtgttgtttaaaaagttggaaagaaaggtgtgctgggatgggtaatcttcttaaggtgcttaccagggaaattgaaaactatccacattttttcctggattttgaaaatgctcagccgactgatggggaaagggaagtgtggaaccaagttaatgcagttttgcaggattcagagagcattctgtcagatcttcaagcctataagggagctggacaagagataagagatgctatacaaaatcccaacgatatccaccttcaagaaaaagcctggaattctgtgtgtcctctggttgtgaggctgaagcgcttctatgaattttctttaagacttgagaaagctttgcagagtttgttggagtccctgacctttccgccttacgctcctacacagcatctagagcgagagcaagcccttgccaaagagtttgcagaaattttacatttcaccttgcgttttgatgagcttaagatgagaaatccagcaattcaaaatgacttcagttactacaggaggacaataagtcgtaacaggataaacaacatgcatctagacattgagaacaacgtcaacaatgaaatggccaacagaatgtccctgttttatgcagaagccacaccaatgctaaagactttgagtaatgccacaacaagctttgtctccgataacaaaacgttacccattgaaaatacaacagactgcttaagtacaatggccagtgtatgtaaggtcatgctggaaacaccagagtacagcagccgattcaccagtgaagacacgctcatgttctgtatgagagtcatggtcggagttatcatcctgtatgatcacgtgcatcctgtgggtgctttctgcaagacgtcgaagattgatatgaaggggtgtataaaggttctgaaggagcagccacccgattctgtggaagggctgttaaatgctctcaggtttacaacaaaacacctgaatgacgaatccacttcaaaacagatccgagctatgcttcagtaaaatcctatgattgaagaggattcttttactgacctcagaagatgtatatgtttacataatttaatacagattgatgttaatacttatgtgtagtaaatagccattacctacatgtcactgaaacctctcgctgtatctgtctccttaacggattctgcacaacctgcgctgacactccattactatgtgattctcgagatgaacaatgactgtgtatatatttttcctttttttttttaatcaaagtgcttaacaatatttaaaaagaatgtcttgattaaaaaaaaaaaaaaaaaaaaaaaaaaaaaaaaaaaaaaaaaaaaaaaaaa

SEQ ID NO: 541 - DNA, 1013 bp, Xenopus laevis
tgaacttcaagagatggcactgtaggagaatgggtataatctctatatggaaggagccttgtttgggataatcagctgagcctagccaatttgaactatggatttcaatgccaacacactgtgctgtgctagtgcccggggtgatgtgaatctggcaagacagatgctacagagtggtatcccagtaaatgccccaaactctcatggaaggaccccaatccaggtcatgatgatgggcagtcctcaaatggctgaattgctgctggattacggcgctgacccaagtgttcctgaccccagtacaggaacctgcccaactcatgatgcagcccgtgaaggctttttggacactctgctagtgctgctgaggaatggggcaaatctctacgaaccacgggacaactatggtcagcgacccatagacctggcttcaccagacctaaaagcaaaattactgttgctaggatatcgctgactttttacttttttttctcctgttggtgttaaaatattattatacaattgtaatataaaatactagcaaaggtgaatggagcacatggtagtaatttattgctttttgtgtttttcttataccttcctgttatgttttccttttttctgtgctttttcattttcttataatttcccatttttccttcaagtcatgtaattactcttatttcctaccaccccctttttttatttcacattttctattcctcttaaataacatttctacacccgtcttttgtttaactatcgtaccagttccaggttcctcctttctcctcccagttttttttagctccaaattttggctgcttttctgttctataaattttgccttcgttctttccttcttttgttccgtctctcatttctaatatgaaaacacatgtacagtgtaaatatgtaaatctttgtgaccatggcagattgcagggagtgcagggagctaaataaactacatattggaagtgctacaaaaaaaaaaaaaaaaaaaaaaaaaa

SEQ ID NO: 542 - DNA, 1350 bp, Xenopus laevis
caatagtggaagtggctgaagaggacgcgtcgggataataatctcctggactggcagctctctcaggggcaacatgattgaagaggagcagtttgtcaacatcgacttgaatgacgacaatgtctgcagtatatgtaagctgggcaccgacattgaaaccctgtccttttgccatatctgctttgagctaagcatcgagggggttcccaggtcagatctcctacacaccagatccttacgagggcacaagggttgctttgagaaattccatctgatagccaatcaggactgccctcggtccaaacattcgaagagccactacgaggaagtgaagaatatcgtaagcaaaaaaatcaactggattgtacagtacgcacaaaacaaggacttgtatgcggattctgaatgcccgaaatcttcccagcacaagctccgtaagttccggcaccaaagcgacaggactctgcttcctcagaatgattcccaggtgcccaggtattcttccaaatggctcgaagcaagtacttgcgggatgtccagccgtgcgcagggaatattggagcagagcaaatccagagacttcactgccagcatgttacacaatggcaataccgccttttgccacagtagtagtttgtggcccagtactaataaaccacaaaagatagaaaacgtcaaccttagttctggctctagtattcaaaggagatacaagcatcacagcagggaagagttaaattcaatgagcaatgaagaactggggcactttaaagaaaacctccttcggcaaattaaagatgtgtttgaagatctgagtgctgtagtgcaggacaaggactcgctatcttcagaacttcatgtacggcacatcgcaatagaacagctactgaagaactgctccaaacttccgtgtctccagatgggtcgagccgggctcaaggctaacgttccgatcaacaacaactgaggcacctgcttgtgctaaagcaacacttgccacatacaatccaaactcttccagtctcctttcacatcatttcctttttccagtctcgaaacgaaaaccgtaacttgtgttgcgttcatgttgcttctgggattcttgaggagcattttcagtcctattttaaatgtgttgcattcagcaagaaattcaagaatagatctatatataaatttttattccggagtgatttcaacatgcagaattgttcctttgcacaacaagagcacagcaaaatatgcaagaccgtcctcctttagccattgatgattaaatgcatgggacattgttaccacattcaatgaggcaataaatccatcgttggccttgtacaaaaaaaaaaaaaa

SEQ ID NO: 543 - DNA, 1795 bp, Xenopus laevis
cccatttctatgtgccgggtcggagactgcgcgggacggtgtaacaaaaggcgagccttgtgatcatccattgaggaaagagttgtccagtgtattgtcctgcgacgggtcaggtacctgtgggttacacagaaggaaagcagcaggtgagagtcaaataacaaccacaaatcctatgaatctgatgtctggctggcaaagtcccgcccatgtatacaattgttacagaaaggaaagatgatgttcaaacacttggttcctctgagaaatggcttcaacaaggagaggacgtctcgtcttaaagcaaggcttttttttctttctaccatttttggatccattttgcttgtatttttcttctgtgaatttttggtgtactaccttgttatagttaaatgcagctggccggaagtgaaaggagcacacaaggaggacagtactcctgttctcaaagttatgtttttggcagacacacatcttcttggtgaaatcaggggtcactggcttgataaacttaggagggaatggcaaatggagaggtcctaccagagtgccctctggttactgcagccagatattgtctttattctaggagatgtgtttgatgagggcaaatggagcattccacaggcctggagcagtgatgttgctcgcttccagaagatgttccggcatcctccacacacacaactaatagttctagttggaaatcatgacattggctttcactatgacatgactgtgtacaaattaagccgatttgagaaaaccttcaatttcacatctggaaaattagtgtctcccaaaggaatcaaccacattctttcctccagctttgtcctgttgaacagcatggctctggagggggatgactgtcacatttgcagagcagcagaggatcagctcagaagaatttctatcaagctcaattgctccaggatgagggaacatcctgattttcaaaagaagtgcaaaaatgttgaaaaaacacctgtatcagcaccaatccttctgcagcactatcctttgtatcggattagtgactctgaatgcaccggggaggattctgcttctccagaagaaaagaaagtgttattcaaagaaaaatacgatgttctttcccaagatgcatctgaaaagctgctgcagttattacagccaagactcatattgagtggccatacacacagtgcctgtgaagtgctccatcaaggcaaaattcctgagatcagtgtcccatccttcagctggagaaaccgcaacaacccaagcttcatcatggggagcatcacagcaaccaaatattctcttgcaaagtgtttcctcccaacagagaatacgatcatctatatctactgtacggcaagtgtgctgctcactggctatgtactggcttgtctgtggctttgtatatgccagaggattcactcgggaagaaaacaaaaaccaatataaactggaatgtggcatcaatatgctcaggagccccccgagcataatgcaagcatgaacagacattctcctctcagataaaacagagcatatgatcaaatgtgtatttattaaatgggtggctttatctgttgagggaaatacagtcccgtatcactaaagcaggtgacacccacccattgtatctatagaacctgtgggatcaggccacactcagttctctttttcctctcactcttcatattgtctttttttgtatccttgtaaaaatcatgtatattaaaaggagtcatatgattaaaaaaattaataaataaaaaaaaaaaaaaaaaaaaaaaaaaaa

SEQ ID NO: 544 - DNA, 1588 bp, Xenopus laevis
gaggggagagaccaagagacaggcacttacattacactcacaatctgggaatacagggacacttaatgtaagaaggggacgtatagaatttatctctgatcagctccagcaataaattgactctgggattgaagagcagagctgacttgaagaactggaagggctgaaacgaggattgtgctaaactgctctactcagagtttcactggaccccaacacggcctacataatggctttgccaacactgtcccccgcgaatggaacttactgccaagacggaatacagtggattttaaatgtgtttggcgagtgcgcagtgaatgggcgggattacgccagcgtgtatctgggtgtgatctccatggggtgtttcatggtttgcactttcccacagttctatgaagccttcaagactaagaagatgcacgaggcaatgtccttatggtttgtcctgctctggctgctcgccgacaccttaaacctcactgggacttaccttgccaaccagctccccctacagaaatacttttgcatctactttgttgtgaacgactgtctgatgcttgtagtctatctctacttcaagttccaggacagcaaacccaaaacttacactgccttacccgctgtttgtggatttgcccttctgggctctgtggccactttctccctccatcaggagtcagaaccaactgtgctgaaccccgggaatgtgatacccagccggcacctgctctctgctgatgggaatgaggagaattctgtccggatggcggttggttttgcctgtggaataatcgcgtacgcaatatgtctcgtcttccggattccccagattgtgagcaactttaagaggaaatcagtggaaggtttggccctgggtatgttcctgttcattatggtgggaaacatcttctacggactgagtattgttatcaagagcccagaggaaggacagacggacgccagtgaagctctaaatcatctgccctggatcataggctgcatcatgttgttttttctcgatgttatttgtatgtatcagtttgccagttatagaccaaggaaagattctgaagagaagtcgccgcttctggagtccaacggtcccatctgtccctgacggggaaatctggattgtgcagacagggggcagcgttgagtcactttatacagactggggaaatgttctcacactaattctctatggacacagctgtgtgtggccctacagagagaggacagggtcataagcctacagctccctctgttggcagaagagtattttttttatcaaccctgaacccgaagtgggttttttcctctttgtttttttttaaggtttgaaagatttttaccgttaagctttgaatgaagggcccccatatccctgtaccccttgcacaaacactccatgttacagtaagtacaggagccactgaataaagaaaggatatcatcatcttttcatattcccttttttatgccggtcacttggttgtgaggatgtactgaatgaatctgctttttataaagttacattgttacaaactgtaaaacaaaaaaaaaaaaaaaaaaaaaaaaaaaa

SEQ ID NO: 545 - DNA, 1569 bp, Xenopus laevis
gataattcgggtgtagcgcccaaaagcgataagtatcaccctggaaaaggcagatcccagcattgttccagaggatggaattctcttcccatcacattcgtcttctgcagcagttggatgaacagcggcagaaggatctcttttgtgactgtcacattatagtggaagggcagatgtttaaagcacatcgtaatgtactgtttgccagtagtggttacttcaaaatgcttctgtctcaaagctgcagggacatgggtgagccaatcacagccacctttgatgtgttttctgctgacacgtttacagccatcctagactttgtttattcaggcaaattgcctctttctggacaaaatgttattgaggttatgtctgcagccagctatcttcaaatgaccgatgttattggtgtttgcaaaatgtttatcaaatcctccttggacataaatgagaaggacagagatggtttcttcagcctttcagacaaggatgctggcagtaatggttctgggctttatgctgcaggttggaggactgagagcagcccaacacatacacatgatacagcagagcatggcagctttattgctggttataattacccccctccaattacctcacggttgcagcgccctttctctaagcacccacgcaaacctgagcttgttcgcaagcatcgtaggcgcctactgccagaacctctgacgccagcaccactcagtcatattccactgggtgacttggtgggaggctcagcagaatgtatgctgcatgatgaggaaacagttgagagtgtgtcacaggaagaggaaagaacccaaacacaggagtccataataagtattaaagatgaggatgaagatgctgcatctcacagctggcctgaatctcctcagcaagagtctctggaccagggtccagctcttcatataaccaaggcagaagagctgtacaaggcaatgcctaccatgctgggaggagtatctggatggggtgaagatgaactaagttctgggaggtttaaatgccctttctgcacccataccgtgaaacgtaaagccgatctaaaacgtcacctgcgatgccacacaggagagcgaccttacccatgtgaagcctgtggcaagaggttcactagactggagcacttgcgcaatcactttcagacaattcatgaggctggtaaactaatctgtcgaaggtgcaaacttccagtaaccaaagtaaccggtcgtgttattcaggatgggacaaggagataccgcctttgccatgcatgtctggcagaagctggcttggataacgtcaactttgactatggagaagaccagccattggtgttaccacctgaaaatgagagggaacattgctggaatttcaaggaagaaggaagaaaggaaaatgggagtgagcgtgcagagtcagacctagctatacaggaggtggtagacagcgaagatgatgagttgaaagaaaaacaagactaaagttgtgttggatgttaaaaactgaattaaatatatgaattcttcgtaaaaaaaaaaaaaaaaaaaaaaaaaaaaaaaaaaa

SEQ ID NO: 546 - DNA, 1469 bp, Xenopus laevis
cgcccatcgtttagtggggaagttcggcacatgctttagtgctgggttttgcctgtctgccttcctactctacttgtctgttgccggtgtgaagtaacaggggtcgtggagggcagttgttattcatcatggggaaggaagcagtgctgttcctgatgctgctcatccactacacagtgcggcactgcctgggcttctcccagtctgtggatagcgattatacctttaccctccccgcggggcacaaggagtgtttctttcagcccatgaagaaggatgccactctggagatcgagtatcaggtgttggatggtgctggtttagatgtgggtttttctctcatatctccggatggtgaacttctactgtcagaggaacggcagtcagacggggttcactcggtagagacagttgacggcgattaccagttctgctttgacaataccttcagccgtatgtctgagaaagtgatcttttttgaattgatcttagatcacttgaatgatgaaggaaacgaacaagaggactggaagaattatattatgggcacagatctgctggacatgaagctggaggatatcctggaaactattaacagtgttaaaggtcgattaaccaaaagtgcccagatccagacactgctaaaagcctttgaagctcgagatcgcaaccttcaggagagtaattgtgaaagagtgaacttttggtctgttttcaacttggtggtgatggttgtggtgtctgctctgcaagtctatatgctaagaagtatttttgaggacaaaaggaaaagtaggctctgacaaactgtgaccaagaatttacaaagaaatactttttttaataccctctcagggctagcatgtacaaaaagccttttcttccaaatccctgccgtattcagatattagggtctgaaaaaaaaaaatttaaaaaaaaaacttgccccaaagagtaacacacaatattcaatgtttaccatttttgtatattaatatgaaggttttgtattgattttgaaacctacattagggtggagaaatgttccctcattctcctatttctacacaacaggtatctttcgtcatgcagaaatagcatacaggtcctaatatttcttaaacctctgaagaatgcaacattacataaaaaggttaggccaataatcagtgttgctttacgttgtcacatggtgcatagccactgatcagccttcaactgatggaggatttgagcattactcgaaggatatgggaactttaagatggattgtaaaaggtcactgtagtcctaattttattttgttcattattgctgtgaattgtaatgaggttggttttattgtgatcatgctaaaagctgttaaactttgaaatgaatacatgttgaagggttgtcccaaatttcaataaaacaatgaatattgtagtaaaaaaaaaaaaaaaaaaaaaaaaaaaaaaaaaaaaaaa

SEQ ID NO: 547 - DNA, 1766 bp, Xenopus laevis
ggctgattgaggaagagtcaattagagtccgtgacagacaccgaggatgtctggtctgcgaaacctgggtctggctgtagccatgctggctgcctctgggggtgctgccctgctcacctggagctacattacaactaaaagaaggaaagaggagcagaaagaagatgttatcaaagaggagcagaaagaagaggtcgttgccaaagaggagtatcttcctgtagagagtcaggtggctgagcggtgcatgttactggctgcaagagagcagcctcagagagagcctcagacaaggaagcggcaagtgttggttctgggtttagatggatctggaaagaccagtattctcaactccattgtaaccaacagagggaaccacagcacagtaccaacggaaggaattcatgcagtgtgcataaccaatggcaagtccaaaatggagttcttagaagttgggggcagtgaacagttacgcccattttgggaaagataccttgatagagcctttgcccttgtttatattgtggactcaaccgatcacggccgtctgccgcttgctaaaaagcatcttcatcagttgattcagcatgattcttcccttcccttggttgtccttgctaataaacaggaccttgaaaatgcatatcacatcactgatatccatgatgctcttgcactgtctgagatatgtgaggaaaggaagctgtttttaatcggcacccatgtggcaacagatggctctgaattaccttccagtattgaagacacacaggaatttcttgcacagctgcttttagaaacccactgacggaaaccagaatggttgcccatgaaaacatgccaaatgtattcttaagaatgaaactccactcacactaggaccaacccctttatatgtcaccctggagcctgactagttacatacaacacgatgcactgatacttcctagacatgccactctcttatgggcatgaaagggaaaataggggaaatcccttcagcataaagcaaaacactattagaggactttcataatagcactttagatacattaaaatagttttagttaccaaagttttcttgttttattgaacctcacacagagagcccacaagcccactgagtatttgttgtttttatataacaaaaacatgtgccttagtcttagaatgctaataagtttaaagtggacctgtcacccagacacacaaatttgtataataaaagtccttttcaaattaaacatgaaatccaatttctatttttttattaaagcatttatagctattgtaagctcatttaaaaagctgtcaatcaaatattgtctaccactcctctatgccatgggcatagaggcgtagcacactattattttcactttccattcagcacttcctagatgtccctgctctcccaatatttcctccttcttttaacaatttaattgtgtagtcagggcatggggatgaacagcaggtccctcattctggtgtacaaacaagattctgagataatacaaggcttgccttaataacagtgtccacaaaatggctcctgcctgtttgttataattatgaattcccagactgaaggaaaccagattcaaataatttatatagtgtaattaaggttcattttgcttgactaatgtgataaaataggattttgaataatcttttttttggtgacaggtcccctttaaatggaactggcaatgggactaaaacaacaataaacgaacaagttttgtaaaaaaaaaaaaaaa

SEQ ID NO: 548 - DNA, 1137 bp, Xenopus laevis
ctgacgcgagttgctgttgagtctggcgagtggcttttgaggcagttctcgtgtgagctatggccagcgttcatgaaagcctgtattttaaccccatgatgaccaacggggtagttcacgccaatgtgttcggtataaaggactgggtgacgccgtacaagatctcagtgctagtgttgctgagcgagatgagtaagaatacgaaaatcagcttggtggagaagaggcgcttaaacaagcaaatccttcccctcctgcagggaccagatatgactctttctaaactaattaagattgttgaagagtgctgtccaaatgtctcaagctctgtccatatcagaataaagttgatggctgaaggagaactaaaggacatggagcaattctttgatgatcttgctgattcctttacaggaactgaacccgaagtgcacaaaacaagtgttgttggacttttccttcgacacatgatcttggcatacaacaaactttccttcagtcaagtatacaagctgtacacttcgttgcagcaatattttcagagtgagaaaagcaaggccacttcaaagacagatagtgatgaggcagatatggatcttactaacaatgacgaggaagaaggaaaactggagaaagaagatctggatttccctattggggaggacgacttggcttgcagtggcccattatcccagaaacaagcagaatatttcctctctcaacaggcctctttaatgaagagtgatgagaacaaggccctgaccccagtcttactgcaaaaggaactaaataatctgttgaagttcaaccctgatttcgcagaagctcattacttaagctatttaaacagtctgcgtgttcaagatgtgttcagttcaacacatagcctattgcattactttgaccgcttgattctcactggtgcagagagtaaaagtaatggagatgaaggatatgggcggagtttgcgatatgctgcattgaatcttgctgccctgcactgccgctttggacactagtatgtttgggttatgttatatgtgtacaagccaaaacagagcaagatacagtctagctaatagagtatatatctggtcataaataataaaattaataaaaatcaaaaaaaaaaaaaaa

SEQ ID NO: 549 - DNA, 2248 bp, Xenopus laevis
tcaaaccggcccggaaacgcgtcgtcggaagtggcatttgacaccgaaatcaagatggcggcgcgcatgtattaaagaggacagagcgggcacaggatgagaggggtatcagctatgtgcctggcacagcttcatggcaaagtcacagggcaacttatcgcctgtcgggttctgcagatatgcaggagacaccctgaccgctggcctttatttcatccacccagatgtaagtatgtgacacagcacataaccttaaaccaaagagtcaagccgaaaccagagacagtagaaagctctgtccaagaggagacaattgtacaagaagtaaaagccacatccacaactttccctttacctacccccgaatcatacaaaaatgcaactactcagggacccccagctgatcacaagctaccgccctcagccaatgaggaacggggctggagggaaatgaaagtcgaaatatctaccctaccaggtgttttggcacggctctcaaaaatcaggcttacagccctagtggtgataactgcatcagctgggtatgccatggctcccgtgtcctttgacccaacttgtttcctgattgcatcagtcggaaccggtctggcttcctgtgctgccaactccatcaaccagttcttcgaggtgccattcgattccaacatgaacaggacaaagaaccggcccctggtgcgaggacagataagcccactgatggccgtctcctttgccgcggcctgcgctatcgcagggatctccttgctgacatttgccgttaaccctctgacgggggccctgggggcctttaatatcttcctgtatacctgctgttacacgcccatgaaacggctcagcattgccaatacgtgggtgggtgctgtggtgggcgcccttccgccagtcatgggctggacagcagctactgggagcctggatgcaggagctttgctgttgggcggcattctctactcctggcagtttccccactttaacgcattaagttggaatctacgtgaagactattcccgagggggttacagaatgatgtctgtcacccatccactcatgtgccgccaagtggcgttgcgtcattgtctggctctcattggcctgtccaccctagctcctgctttagatgtgaccacgtggacctttccagtcatatcgcttcccattaacttttacatctcttacctgggctaccgattctacaaggacgcggaccgttccagctccaggaagctgttcttctgtagcttgtggcacctgcccatgcttttgctcctcatgttcacctgcaaaaagtctgtggttggcaagaaagagaaggacgccatcttggaaccaagctgaactgttactggttaactatgaagaacctgctgcaggaggattattatgggtgacaatcttccaaccactatctcagccaatcatacccacaaagggttccaagttttgtattttgcactgataccagttttatttgccccaagcaacaggggcatccaggaaagtcatattttaaggtagaaagcatcagaaaatgaaacctcagcctgaccaatgaattgtatttttctcttgtgttaataggtgttggaaggtatggggcattgcttgctcctttagcctactttggatcacatatttatttaaaatatcatgtatatgtcactgaggctaatgctgccatccaaagattgttattgcccccagtttgcccagtgtttttaacgtccataataaagacaatcttcataaattatctaagtccaggtggacaggggtgcccacggactgctttggtcaagatactcatatcaaaatgtgatattagagagactaggggttgctgggagtccccaggaaactagagcttactcccagctaggctggttgtgataggctgcatccatatattgccacctgctgccagtagcatgcattgtttgaccagtctccaacacttggttatggtcagtagcacaggctgagaggttggggttctcctgtgtactagagtgtccactagctcacaaacttgcatctcttgccacaaataaaagtgattttccctgtgaatgaacaaacacactccatttttaattgcccaaaagtcccatattctcttgctgactttgggaatcccctcagaaccagaatactgtaatatctgcaaactgtccgctctgtcactgctgcttcttccaataaaaactgaaaatcaaaaaaaaaaaaaaaa

SEQ ID NO: 550 - DNA, 2556 bp, Xenopus laevis
gaaaggtgttagctggaattagctggaactggaacaactttttgtaaactgttttgttcagattaacatttgcagttctttttgctgacagtcttgttatatatagatatattgtaagagtattgtttctgttcagttgtagcatgccaacatgagcccccctgtgtcccaagtggtggttgttggcggaacacacggcaatgagatgtcgggagtctgtctggctaaacattggcttcaggacccttcagaactacgtagaaaatcctttacagctgatatattgttagcaaatcctattgcagtggaacgctgtgtacgttatatagacagggacctcaatcgttccttttcacatgaactcctaagtgcctcagcttcggaaagtgattcttatgaggtaaaacgggcgagggagatatatcagaagtatggaccaaagcaatcttctttaaattttgttattgaccttcacaacacaacctccaatatgggtacaacgatactactctttaagggagacaattttgcattgcacttggcaaactacttgaagactaaatgtgttgatccttctttcccatgtcacatcctcctcattgacataccagaacaagggcatgttcatctgcagagcatgggaaagcattcgataagtttggagctaggcccacagcctcaaggagtagtaagaacagatgttcttgcaagaatgaaggtgcttgtgaacagcagcttggattttcttgacctgtttaaccagggcacagagtttcccagttttgaagcagaagtgcaccaagttttgcacaaggctgatttccctcgcggtgcagatggtgaaatacaggcctttatccactcagagttgcaggacaaagactatcttcctctaaagccaggtgatcccattttccaaaggctgaatggagatgacatattgtacaatggagagaaactaatctatcctgtatttataaatgaatcagcatattatgaaaaaaaagttgctttcattgcaactgaaaaaaagcactgctttgtcccggctctcaagctccagaattaggttgttcaagatattatatgcttcatttccaaagaggcctttctgataggtgtagttgtataaggttgacaaattatgtccatcaccttcaaccttttgtccaagagaaacctgcataatttcagtttgaagcacctgcaatgcagttatgactacacttacatttctcaggaagcaattacctatgcaacagaggattggcaacagggccccaaacatgacacaatgccagcctgatgccctttaaacatatagtagcatattacagttcataattataattttaatttcttatatattttactccattctgaggccttaatggtaaaaaaatccaccccctttttattacttaagctcattcagttggggttatgtaaaaaacttgcataaacaatatctgaagtgctagaaattaatatatatatatatatatatattttttttttacaaagaaatacctgattctggtcgcaggcattagtgttcccctatgggctcacagtgtattgcaattcctccagtgtgaatgatgtgttctgaaggtggccatacacaggccgataaaagctgctgacagttgatgcggtccttgatccgcccgtctgctcatattctccttgttgtgatccaatcgttgggtcctagggcccatgatcggatcaggccgatatctcccaacctcacggtgagcaaataatggggaaatctgtgcatttggtgacctcaccaaactagcggatctccgtatgtatggccagctttagacttgtctgctttttatagtgggtgcggcacagattctctggaaagcagagagacctcaaatcccagaatcaagcacttcacaatgaaagaaggtaagggagggagttgtattaaactctgagtttaaggactgaactccacggagcgattcgtcatgtggtgaccaaacacaggtgaagagtcggagtggcgccgagtgtgatgggagtggtggaagggtcgcaggtgcagactacatagaacacgactgtccgatgaagatgcagcgtgcagcatttacatttgatagtcgtgtcggatacatgtgatttgtgcctgtgatgtttctgtcgctcccattgtattcggccctttccgacttgtggtctgtttttcgttgccgcttgacgaatcgttcagaatcgtttggtgaagttcagccctaaagagggtggggaaccagtcctagagactacacaggcagactatcatggtttcatttaaatctatatattttatgagcattgataaatcaaagcatggccagttcccgcgctgaactagagagaacacaacattcatagtccctctaattgttattgttgagtgtaaaacatctaatttagataagtactgaaggcttttatttatcaaaatgtgaaaaggaatgataataataataaaaaaacatatagttatgggtaaaaaaaaaaacaaaaaaaaaaaaaaaaaaaaaaaaa

SEQ ID NO: 551 - DNA, 2508 bp, Xenopus laevis
cgacacggcatagtaagctgatcgtttaccatggagaaattaggaatgagctttggaggtggtccaagtaagaaagaacttcaggagttggtagagactcaacggaaacaactacaacagtaccaggtgcgactgaaggatgttgtgcgagcatataagagtcttcaaaaagaaaaggaggcccttgaggccagtatccatgtcctttccactactcaggagccagcaactgttatctcagaatctgaagagactaatgatgaccagcattctatacatagtgaggatagtgttgacacggcaggaagtcttcccagcgctagaggaggtgagaccagtgaggatgagagaccagacccttcccagagaggtggaatagaggaggccagtggttcagaaagtggggtcagcacagccagtggagaaggaggtcaagccacagcagtagagactgaccgaaggacggtgcagctaaaaaaacagcttgctacactaacaagtgctttggcaacagttacacaagagaaatctcgcatggaggcttcctatcaagcagataaaaggaatgtaaagcagggcacagaggagttgatgcagagcatggaggaagcgaggagcaatttgctggaagaacttcagagtctccaggagcaacttgcagagaccaagggcagattaataagccagcagcatgatcgtgctcaggagcaaatagaccatgctattatgctaaaagaacttcagcgactcttacaaggagaacgagaccatcgtcaggaaactgaactccggctggaggaatcaagacaagagctagcaggcaagttagcaggcatatcagagctggaaggaaggtctgaggcagctgaagagcaaaacaaaaaactgcttaaagaacttgaagaactaaggaaggagttattggaagctaggcggcagggagcagagcctgacccagcagtaagaaagctccaaacagagctgggaagagtgaaagtagagctgcatggtgttctgcaggaagaaagaaaaaagaggttggatgaggaacaacaaactatgcagcgttttctacaggaggagcaacgtattcgctcccttgagtctcaggtatccgaaatgtctgaacttcttggtgcagctgaaacatccaaacaaagggatcaagcaactattcgcaagcttcgggaacgtctaatacagctagaagcagagaacaaaactcttgcactaacctcttcattgcacgcaccatctgaagttacttttgattctaataaaggggaggatactgatgagggttcagagcagcgtgcatctgcccttttttaccagcaagagcttcagcaactgaaggaggaatttgaacgctataaatcacgtgcacaaggtgtactgagaaccaaaggtgcacgagagggagaactggaggctggcagaaaacagatggcagaactgaaagaacgatgtgtttctctgcggctttcttcagaagaggctgaaaacagacacaaggcagaaatggaggctgcccaaaaacagattgcactattgcttcagtctcaccgactggagctagaagctgtgcgcagagaaggaagagacaatatggctcgtctggatgaagaattgcgacagcatagagaacgggtgctatctgttctagctgagaaagagcaagagctggagagattaagagaaacaaagatcacaacactggtccctatttcagccctggactcaattggcaatggtctggaaattccaaagggttcctcctctacttttatagtgtatgcagagcagctttctcgcaaggaagcagagattggaaacctacgacggagaaagcatgaactagagtcagaactacagagtatgcaggagaaattggcagagcagaaggaggaggtgaatatcttgcaggagcaagtgaaaaaggatgtgcgagataggaggagggagggggcaaacatggagtatttgaaaaatgtattattaggatatttgaccttgccagatcccagaggaagacagcatacactgagtgctctgcttgcagtgttgcatttttctcctgaggaacgaaatgcagctttgcgtgcacaggaggggaataggtggtgggcaggaagcaagaggtgactccacctgaaagacttgcatatgttgtaagtagacagcacattgcacattaaatttgacagacattcgtgatctcccctgtgagatctaagaggtaaaactttgaagtcaaaatagccttttgtctacctttcaactctgatctatctgaagttaaatcatgctccacctccttccaactatacagttcttgactgaactgcagtagagtgattgtgtctaaagaactcttctagaaaattactgttgcaagtgagagctaactagtcagattaggttgcattcaaaatgtgattgtaaatatggccttcttggcaaaggaaacaataaaacactgcttatagcaaaaaaaaaaaaaaaaaa

SEQ ID NO: 552 - DNA, 2101 bp, Xenopus laevis
gtggtcgggcttattcatgctggctaaaagccggctcgctattggttactttgtccggagagtaaactgggcgccatagctgcctttgtgggtgggtagaagttaggatgtgtgggggactgtgaaactaaggggaggaaaagcaccgaactcgctgtggaaggaagaaagcgaaggttccttgatggatttgtcctttgctggaagcaccaggcagttgagaagcagcagtcgcaatttggtattgtcaggcacattcacatcccaaaaccaaagatgggcttcaaaagctgacaatcgagaaacctcactggtgagaaacttggatgctgacttacatgaggctatgactcctctccgttcaacagctggcagtgtgacagaagaatcgatgcccagtccaagccctgagaaatttggacgtaatgggactgttgtgtcacaagtggtgactgtcaaacggcataaaagatgggccacccgaattttgtcaatgttgtgctgccttgtcgttgtttgcattctctctgttttgcttgcagtactatatctcgttatacaagacatgcaatctggaagagaaattaatgacgaaggagagaagattagccttttaggattctggagtcttcttgcgttgtcccttctagcgggtctatcctgctgcagcttctcgtggactgtcacctactttgattcttatgaaccagggatgtttcctccaactccactttctcctgcacgcttcaggaaaatgactggccattccttccacatgggctatactatggcaatactcaatggagttgtagcagctctgacagttctctggtgtttgctataattgcacagcatcaccatttttataaacggacttctgggacctgggattatgtaaaacagcatagattttatgtatatggaggaataattttagctaagtgatgtttttttttcatgtccagtttttaaaaaatgtttttttgtaatttttcaaatagctattatggaatctttagtcttacatttttgagcacatccaattcatatggtgaacgatacacattttaggtcattttagcacataattatagcctggttggggtattgtattatcaggacacctgcacttctatgcatccagctttccacaagtagcaggtccctggatgaaccttttatatgtaatattaatgccatatgtacagtttttacatttatatgatctattttgggctttgcgagtataaattgtttagtagaaaaatgaatcggtgttcggtatttagaaatattttataaatgtgtgaatgaaattgttatttttgcaggcaaatattttaaaattgcagtgctaaattatttgtacaccatggggcccatttacttagctcgagtgaaggaagagaggaaaaaaatttcaaatggttttttttggctacttcgaccatcgaatgggctacttcgaccttcgacttcgaatcgaaagattcaaactaaaaatcgttctactgttcaaccattcgatagtcgaagtactgtctctttaagaaaaacttcaaccccctagttcgccacctaaatggggaatgggtcaatgttagcctatggggaaggtccccatagcctttggtagctttttttggtcgaagaaaaatcgttcgatcgatggattaaaatccttcgaattgaactatttgcgctaaatccttcgacttcgatattcaaagtcgaaggatttaacttcgacagtcgaatatcgagggttaattaaccctcggtattcgaccttaagtaaatttgccccccataactcagttctcatttgtttacagaaccactaacatattagtaagatggaaatgtaatggggcattggtattgtattaatgtagatgcctttgtagctttcatacagtctgatttgaaagattctggattgtacgcatgaatcaaagcatccgagaggtcttttatccgcaaactggtgcagcaccttctgtcgtaagttacatggtttctgacataatgctattctcttcttatataggacaataaatggaaatacttcccctttagtgtaaacaaaaaaaaaaaaaaa

SEQ ID NO: 553 - DNA, 2271 bp, Xenopus laevis
atgttccctcaaaacagacctccgactcacctacaggcctcagtggcaacaggggcagcatctggcccccctcagagcctcaaactcacctatcctgagactttggaccgtatcaaggaggaatttcagtttctgcagagtcagtaccacagtttaaagctagagtgcgaaaagttggcaacagagaaaacagagatccagcgtcattatgtcatgtactatgaaatgtcttatggcctgaatatagaaatgcacaaacaaacagagattgccaagaggctgaatgtaatctgtgcccagctggtacccttcctttctcaggagcaccaacaacaggttgtccaggctgtagaaagagctaagcaggtgactatggcagagctgaatgcagccattgggcaccaactgcaggcccagcacctctctcaccatgcacctccaatccctttaactccacatccatccagtctgcaacaccctggacttgctgccgcaaccagtgcatcaagcctgttggcactatctggtgttcttggccttcagacacaacttgctgcaaaagagggccttgcagatgcagaacacagagagagagacccagggcctagctgtttaacccttccaaatggtgagcgtgtgcgcactttgtcagattatctaaacagcaacaagaagcggaaaacagaggaaaaagattttggcacagactatggtagtgatgctgaccgcagtgaagataatttggtggttgatgaggatcctgcctctcctcatagtgtccattcttactcttctcgggaaaatggtgtagacaaatctctgcagagaaaagaacctccacctgcaagcccaaactccatgacctcatccagtagcgtgtctccctccaggagcaaagacattccttcacaagtggagaaggcagggacccctggcttgaagtcaagcactcctaattcacagagtgatctgaatacaccaggccccagtgggtccagtgcatcccaatttaggtctatcaccaccaaaccagccattgactccttagctcttggacttaggactccattaggggggcaggggggttatcctgctgcatttagcattgctcacccatctgtaaatgcagatggtgctggggcctatgctgggttgcacctaatgtctccacaaattgatggcgccactgctgctggaacctatggacgatcaccattagtcagctacgatccccatgctcacatgcgaggattgggttctgcaattccagggtctgcatcaggaaaaccggcatactcttttcatgtcagcgcagatggacagatgcagccagttccatttcccccagatgctcttattggctcaggaattccacggcacgcacgtcagctccacgtactaaaccatggagaagtagtctgtgcggtgactattagcaattccacacgccatgtctatactggaggcaaaggatgtgttaaagtgtgggatgttggccagccgggtacaaagactcctgtggcacagcttgattgcctgaaccgtgacaattacattcgctcctgtaaacttctgcctgatggacgcagcctcatcgtcggtggggaagccagtaccttgtccatctgggacttggcgtctcctacccctagaataaaggcagagctaacatcctcagcaccagcctgttatgctcttgccattagccccgatgccaaagtttgcttctcttgctgctctgatggaaacattgtagtgtgggaccttcaaaaccagacccttgttaggcagttccagggccatacggatggcgccagttgcatagacatctctcacgatggtaccaaattgtggactggggggttggataatacggtgcgatgctgggacctgagggagggcagacaactccaacagcatgacttcaattcacagatcttctctctggggtactgccccactggagaatggctggctgtggggatggagagcagcaatattgaggttctacatgtttctaaacctgataaataccagctgcatcttcatgagagttgtgtcctgtccctgcaatttgcatcttgtggaaaatggtttgtgagtactgggaaggacaatttgttaaatgcttggaggacaccatatggggccagcatattccagtcaaaagaatcctcttctgttctgagctgcgacgtttccactgatgatcaattcattgtcacgggttctggagacaagaaggcaacagtatatgaggttatctactga

SEQ ID NO: 554 - DNA, 2738 bp, Xenopus laevis
cagagacagaatggcttgttatatctctctagtgttccttctgtgtttccctgccgtgtattctggcagtcacatgctacaatattatgtaactatgttatctacctctcaatctggtctgccgcaatactcaatcactgcgtatgtggatgatgtgcagtacggaaggtacaccagtgacacacgccgatgtgagcctttgtttcagtctctgatggtattatctaaacacttggatattcagaccaaaaatgcacaacatactgaaattacgcaaagagtggtgatggactttattatggatcgattaaacaagacttatgataacagaaacaatcatgtgtaccagaggaagatagtctgtgagctgcatgaagatggcactgttgagttttataaagaggtggcattagatggcaaagagctcatagtattcgataaagagagagtggcgtatgcacctgcaactcaagaggctgtgctactgacgcaattatggagtaaatattactcagatgcaaagagcgataaattagtcatggaaaatgagtgcactcagcacatgaaagtgtatatatcatttataaaatcattcttgactaaaaaagtgccccatgtaaaaatttccagttcagagtcagagagtggcatcaaactgcactgcagggtgtatgggttctacccccgagatgtggaagtgaagtggataaagaatgagagagatgagatttactccgaggaatcagcagagatcctgccaaaccctgatggcacctatcagatcagagtcagtgtggaggtaacaccagaggagggcgccacttactcctgccatgtggatcacagcagtttggagacgatccacatgattccttttgaaagaaagaccaaggactcaaatattacttatattgtaattgctgttgctgttgccgccgctctcttccttgcttttggcctgggattttttatacaaagaaaaaggaaagaatttaaaggcagccggcagagtgtgagcacagaagaacaagactaagaatcacagcaacagaatttttttgtgatactccctactggaaatgatgtgaatgaaatttaagtgttagaattgtgtcaatatcaagtacaaatgttgtcagttacatacagaaacctagtatattggaacacagagaattttatccttaagacatgacagtgcttggtcaaaaatctgattttttcttaataatggtaatagaacagtaattggaattgtttattccaattattgcaagtactttgtaaatgagacctaaaggggccaaggttgtgcttcttggtgatcttgcacttctgtcctgggcataagtaaatgagcccactgttctcagctgaacagtgataagtcatagttatgaagagtatggaagggaaatatgctgaaactgaaatagaataaagtatatagtatatttttgtttcattttaaaaaaaacgaaaccatcttatatcctggttagcttcagatttacatccgttaaggtgcctttacactctatatgcataaataaatatatggtggatggtgtgccccttactgtaatttatagagatattatgttaccgaggagttgtgtgaccatataaaagcacgaggccgaaggccgagtgcttttatacaggtcacgtggctccgaggtgacttctagtgtctttgtaaattatagcagggggtacattatgcattataatctacaaagatgtctggctctgttctgcctttgccttcttgcctgccacaggtgatgtcataggggaaaggccaaggaagtagggaaacttaaatcaggactggagactgaggtgggagggggagtgtaagttgagagggaggttatgtgaaaattgggagagttggtgagaaagaatggagagaccagagagggggttagacagagtggacacagagatacagggagtcaaaagtcagactgtcagtgcaaaatgcttcacacccctcctgccagcctctccccatctgcaatgaattttgaagcagcaccagagcagtactggttaaatgggaatgagctagaatcagcctgtcagccagcacggactgacacagaaaaccagcatacctgctcctgctgcaatccgctctgcttgtcacccctttgataattactcctccccctcgccaatgaatttccccgcactaacaacaaggggaggggtatctgagcagacagggatcagcagggggagcacatgagacggaagctatgaggggccatatctgacagggagtgagagaaaaggagcgcactgtgctgtaagtaaaatctgagcctgcgagtcagatgggaggggggaagcgtgctgagagagctgcagggagagagcagcggcggaagtgatgtaacatataaacggcgcgttctgatgtcagaacgcgccgtttataaggatataatttacagtctggtcccatagggaaatgaccagactgtagattatatatatatatttatatgttgaacgcagtattagatgaacttgtttgcacattcagtatattttatacacaaaggcattgtagggcacatttgtcatttcactgccattttcctgtttttttaatgtttcttctagaatagtttttatagtttaaagtttgtaatcattggtttttttaaaccaaccgtgtcaatttaataaaatagttggtattttgtgtgaaaaaaaaaaaaaaa

SEQ ID NO: 555 - DNA, 1040 bp, Xenopus laevis
gtcagcgggttgcagataagcaaaatccagtatgaaagaattgttaaaagaaacttctggtcctccaacccgatatgctacttgcgaatggttttaccacgcgccaatgaaccaagcagataagtcagccagagctgctccccttcctcccacatctcaagttccaggtttgagtgatcttgcagaacctcataatgagtcttttaatcagagtcgcaaaaagtggattaaggagactgactcggattatgtcaaactggccaaacaaggaggtcgaccagacttgttgaaacaaattgaaaatacaacaaagaagtcatcttcagtatgccacgcccttccagaatggtatacacatatgactgaaaattcaccagctgaacagagagaacctcctttaagaaatattccagattatatggttcatgaagacttcaatacaagtcagcatgaacaatcatatgaagttaaaaggggcccttttgattttgatcagaaatctgtttggcagagggattctgatggtgtcattaaagaaaatcatgatgataaaaagcaggtgaagctaccagacataaaaacaaggtctaagggtgataccaaaacctttcttggcaaagggcctcccacaacaaatgctaaaaaggcaacatctggaaaaaaagtgcttattcccacctatgccagtgtctcaaaagaaagagaccgttaacatcagtaagttgatgagcaatggctatggaaacgattggtttcagcaacatgatgatctagagagcaaactaccataaaagtccaatttgatctgaggatggaagatgtttcctcagcaatgaacagtttcaggaggacaaaataaatgttacatgtgtagattaaagtctcattttctagaactgtaaagataaatcttgctacacacttagcaatgacttatgatgtttgagtagagtattaagcaatacttatgttagctggttctgtatttaaggaaataaaccattatgcaaaaagaaaaaaaaaaaaaaaaaaaaaaaaaa

SEQ ID NO: 556 - DNA, 1066 bp, Xenopus laevis
cccacgcgtccgcagaatggggcgccactcttcaggttcagaggaagaaacccgatcccgtaaaaaaaagaaacaccgcaaacgctcatcttctagtagttcatcagatggcagaacatacagtcgaaaaaagtcaggaaagaaatcaaggtctcgatccagagaggtatactcacactcctatgaaaaaaggcgcaggcaccgctcaagtagtgaatcctcttatagctcaagaaggaaacgaagtagaagcaggtctagggacagaggaaggaatcgcaagtaccataaatcaagaacatcaaggtcaagatcaaggcaccgccaacgctctcgtagcaaaagcagtgatcgatctagcagaaggagatctcgcagtagatcatatgacagagaacgagggaaaggcaagcagaagtcaaaaataagggagaaggagcgaggaaaagaaaaggcgtctacttccaaaactagtgacttggtgaacattaaagctggattagaacatctgcctcctgctgaacaggccaaagcaaggctgcagatggttcttcaagctgctgcgaaagcggatgaagctttgagagcaaaggaaaaaagtgaggcggaagctcgaaaaaggaaagaagaagatcagtccatattacttgatcaggcgaaaagagcgaaagagatcgaagcgattgaaatcgactcattcgttccacagatgttccgatcaagccgtgacacgaaagcttccactgaaagcaccgagacaaaacatgaatctgctatactagggtcaggcactatcgatttgtttgatgacgcaaaagaatccgagattggacacatgcctactactatcaagtatctggatgataactgcctggcacacccaaatctttatatcgagaaggaagaagcagaagtgaagtggtacaagagattaacgtctctccgtcaagaacgtctgatggggagccctgtagcatagtaacccccggatgtggcctaagctgacccgtgtcattttgtagtgttgttctctaataaatggttttcttacaaaaaaaaaaaaaaa

SEQ ID NO: 557 - DNA, 1160 bp, Xenopus laevis
caagtctggaaacaagcctccttccaagtcatgtttgaaaggagatatgggcaaaaacgaggacagcgacaaaattgtcattaatgttgggggcatcaggcatgagacgtacaggagtaccctcaaaaccttgccaggtaccagactctcctggctcactgagcctgatgcctttagtaactttgactatgaccccaaaacagacgagttcttctttgacagacaccctcaagtctttgcctatgtcttgaactactataggactgggaagctgcactgtcccgccgatgtgtgcggacccctgtacgaggaagagttggctttttgggggattgatgagactgatgtggaggcatgttgttggatgaattacaggcagcacagggatgcagaggaagcgctggatagctttgagactccagagccagaggaggaagaggatggagatctgaaaagactatgtctccaggaagatggcagaaagctgggctggtggaagagatgccagccaaaagtctgggctctgtttgaggatccctactcttcaaaatatgccagggtaatgtatgcccaagctttctctatctgtgcgttatctgccgcttggaaacattaggatgtgacacattgtatcgttatgtatgtgaaatagctaagcctggtcccaatatatcatatctgctatttgtaaacagggttggttcaccttcaaacaactagttggtttcagatagatcaccaaaaagaacgactttttgaaattactttctattcgctatgtgtcaccgtttttctaacatggcagtgtaaagtgtcattttttcaccttctgaagcagctctgagaggggggtcgccgaactgttctaaattatttagttgaaacatttcttgtctttgtccctgctgagcagaatccctgagtttcattacaggcaactgttagaattgatacaatagttgctaatactccagagatgctgctgagaaatgtatcaactaaatgttgcaacattgtaacagttcagagtctgcacctgaattactgagctgaaacaccagagacagggacattcaactttaaacttcgattttggaaaaccagtaaaaaaaaataaaataatgggaagtgattgaaaaaaaaaaaaaaaaaaaaaaaaa

SEQ ID NO: 558 - DNA, 3113 bp, Xenopus laevis
agcatactaacatggcgtctggcggagctgccactagggccttcttggccgatgctgggcacggggaacaggagctggatgccaactcggcgctaatggagctggacaaaggattgcgatctggaaagcttggtgagcagtgtgaggccgtggtccgtttcccaaggttatttcagaaatatccttttcccattctcatcaattccgctttcctgaagctggcagacgtgttccgagtggggaataatttcctcagactctgtgtactgaaagttacccaacagagtgagaagcatttagagaaaatcctgaatgtcgatgagtttgtgaaaagaattttctccgttattcacagcaatgatccggttgccagagcgataacactgcggatgctgggcagtatggcctctataatacctgatcgcaaaaatgctcatcacaatatacggcagagcttagattcgcatgataacgttgaagttgaagctgccatctttgctgccgctaacttctctgctcagtcaaaggactttgctgctgggatctgtaacaaaattgctgaaatgatccaaggattggctactccagttgatctgaaattaaagctgatccctattctccagcatatgcaccatgatgcaattatggcctccaacagtcgacggcttcttcagcaattggtagcatcatatccttctaccaagatggttattgtgactttacacaccttcaccttgctagcagcatcctccttggtggatatacccaaacaggttcagcttttgttgcagtacctaaagactgatcccaggaaagcagtaaagagacttgctattcaggatctgaaattgctggctaataaaacaccccacacgtggagccgagacaatattcaggatctatgtgaatgtgctttgcaaacaccatatgatagcctgaaactcggcatgctctctgttctctccacactgtcatcaagtgttgccatcaagcagtatttcagtgctgttccaggcacaaaggcaaatgcatcaaggtattcggatctgattaaacttgcacaagagtgcagctaccatagcaaccgtggcattgctgctcatggagtcaccgtgctcaccaacattgtatcatcttgtcaggatatagacaatctgacgcttgagaaagatgctatctatggccttgaatctctccttgttctgtgtagccaagagaacagtacaggagcccagttaacactgaagattgctttatcatgcatggtgaagctggcaaagtgccgtccctatctgagccagtcagtggtggaatctctcctgacccagctgcacagtgcccaggactctgccaggatatttatgtgccattgtctggcttctgtcgctatgcagcttccagtcctgggggatggaatgctgggggacctcgttgaactctacaagctgattggacgctccgccaccgacaagcaacaagaacttctggtttcacttgccacagttatttttgttgctagtcagaaagctctgtcgcctgaagtcaagactgtaattaaacagcaacttgagaatgtatccaatggctggactgtatacaggattgcccggcaagcatctagaatgggtaaccatgatatggcaagggagctgtaccggagccagctgactcaggtggcctctgaacacttctacttctggctgaacagcttgaaagaattctccacggcagagcagattcttaccaccctacaagaagatgattatggggcggccctttcatccattgctgatgcactcaaatcctaccataaagggatagcctcactcacggctgccagtactcccatgaatcctttgagttttcagtgtgattttgtgaagctgcggatagatctcctccaggccttttctcagcttatttgcacctgcaacagtttgaaaaccagccctccacctgccattgcctccaccattgccatgacgtcagggaatgaactccagcgctgtgggcgcatctccacgcagatgaagcagtgcatggaagaattcaaaagcctcgccgctcgctatggggacttgtatcagtcttcgtttgatgccgattctgcaactttgaggaatatagagttacaacagcagagctgcctgttaatttctcataccattgaagcgctcattttggatccagactcgtgtagtttccaggagtgcagcttcagtgggtcagtacaggcagacagcgagtatgagcgccggatgatgtctgtatttaaccatgtactggaggaagtggagatgctcgctagaaagtatccgccagtgtcttacctgcacacatcttgcctgtgcagtgcagccatcagccttcttaaggtccccctgtcattccagagatacttcttccagaaactgcagtccacgagtatcaagctggccctgtcaccgtcaccgcgcaatccctccgagcccattgccgtacagagtaaccagcagttggccttaaaggtggaaggagtggtgcaacatggctccaaaccgggactcttccgccagatccagtctgtgtgcctcaacgtgtcctctaccctccagaccaaaccagggcaggatttcaaaattccagcagaaggagtcaggagtgaaatggagcagagggtggtgcctcacaacgattattttagcactcagttcctgttaaacttcgccgtgcttgggccgcaccagatcactgtggaatcgtctgtcatggactcaaatggaattctgtggaagaccggtccaaagacaacaatgttcattaaatcggcggaagatccatttacgcagcaaatgcgcctgcagcaacagcagcagcagcaacaacaacaacaacagcagcagcaacaacaacaacaacagcagcagcaaagccaacaaccagtgctgcagcagcaaaggaatgcctactcccgtttctagtgcccgttacacccgttagtttgttatacacgtgtcataaaaacaggctttgcttatctcatgactcctatcactagaatcatggggtgtaatgttttccattaaaaacaatggatggagtctcattcattctataataaaaaaaaaaaaaaa

SEQ ID NO: 559 - DNA, 2748 bp, Xenopus laevis
cgaggttagattgcgctgatcaaagctgatgtgtccgacttcaggaagtgaagtttctcagctgctcgagtgagaggaaaacaggatgaccactttaattcgacgtggtcgacgcgcagaagagggtcaggaacgcagggcggattcagaagattccatcaaagacaaagatgaggaagactcggccgattctaaggaaattcgcctgacgcttatggaggaagtgttgcttctaggactcaaagataaggagggttacacatccttctggaacgattgcatctcgtcgggcctacgtggaggaatcctgatcgagcttttcctgaggggccgggtggtcttagagccagcgaccatacggaagaaacggctgactgacaagaaggtgctgctgaagtccgataaactcacaggagatgttctgttggatgagaccataaagcatatgaaggcaacggaacccgcagaaaccgtgcagagctggatagagttactcacaggtgaaacatggaacccctttaagctgcagtaccagctgcgtaatgtccgggaacgcatagccaagaaccttgtggagaaggggatcctcaccacagaaaagcagaacttccttctgtttgacatgaccacccaccctgtcaccaacaccacagagaagcaacggttggtaaaaaagctgcaagaaagcctgctagagaaatgggtcaacgacccccaccgaatggacaaacggaccctggccctactggtgctagctcactcatctgatgttctggagaatgccttctcttccctctccgatgagaaatatgacatggccatgatccggtccaaagaacttttggacctggaaccagatacagaaggaacgaaacccaacgcctgcgagatgatctgggctgtgctctctgcatttaacaaatcctaaacggcaaaggcaggagaagaccttggcttcacaggacggaaggtgaactgtgaaggacattttgttggggtgggaagaagactgaggtcaaggactgctttttagcaacatttctgggaaattgcagcttctggctctttggcctctgacgttttgattttcctgagcctccgctaccaaatcctttttaaaattatccagtgcgtctaaaatgcaaatctttataaagtctgagctgcgttccaaaaaaagcagtggagtgggaccatgaggagtccatggaggagatactcttgtaaagtgctatattagtggaaacaaactcagccttggggccttacagatccttcctagtgcagttgtccagaatctccatctttcacagccatccccacatcatctacccataatgctccttgggcccaagcgcattccttatttctccaaatcggacctgcaggtggtacgaagtatctgcaaacttgagattcgtcattattaatccgagctgtcctgttaacgttctgttgtttagggctgtaggaaaaagtggcgcagagaatgcgccactttttttttttatgttcgtctcttcttaatttaaccttctctttgtcagcaacgatggaacaaagccggtgatttcaatgttcgcaaggttttgtcgtgtaattttaaagggtaacaaaaggtggattctgtttcactgcgcagaacggatcggtgggcggaaatatgtgaagtacgcgatgaatgatggggtgaagatttgttttgttaggggtgcttaactagagtggcacaacctgagggtatctcagcaggccctgggtgtccatatgtactgaaagagagattgtgccactgttgcatggctggacgagaagacagttgcttgtcgtaagcatcttcttaagtttacctttaatttaatgcttaaaggggcactatcattatatttccctttataagcaggtccggctttcataaatatgtctccgttcgcttgtttgggcctggtggttgtctctctcccactcgctgctatccattaatttcattcattccacgtcgtccaacggcgtaaacaatggaaaccttgagggctgctttcacgctccgttatcgagacagcgccagccatggctaaccgtaataaaatacaggcggaaaaggagacccccagtgctaatctgctcaatgtcccagatttcgaggcacaaatgaaatttgattaatttggtagtgtccctttaagtttgagattaatcttcaatactgttatgggatgcacaaaaccatagaaatgaagctgtatccaatgatatccacaccaaaagccatatgtacatcccaagccgacacatcccccccccccccagattgggactgatcaaagcctggtagaaaaaggggtttgcaggagaccttgtatattttatccatcgtcgaagctttgtcctcaaaccattgtatcactgttgattctataaatatatataaatatataaataagttactttttcattagctggtatattcttttactctgattgtgactattacagaccgattgaactccaaaccgtacattatgtctattttagaatgagctcctcgtacttaaaggtatattaccctccgggttcccccgaggtttcgttgatttagcttggaaatcgttaccgtcgaaatccatctcgtgtaggaccaaagcgtaatctaatggcaacaatctttcatggattttagtcttcggatgatgcgtctttccaataaaaacttttgtttggtattttaaaaaaaaaaaaaaaaaaaaa

SEQ ID NO: 560 - DNA, 3415 bp, Xenopus laevis
ctcctgctatgtctgtgtgatctgactcgtcaacaagcaatcccggaaccggaccggttggcgccgccatgaggaaaggaacgggctgcggcatgaggtcggcggtgggtttcctgtcacagagggggctacacggagaccccctcctgaaggaagacttccagagaaggaggctgcaggcctgtaggaacctgtacaagaaggacctgctcggccactacggctgtgtcaatgccatcgagttctctaacaacggggggcacatgctggtgtcaggtggagatgaccgacgtgtgttgctgtggcacatggaggaagccatccattccaaagcgaaacccctccaactgaaaggagagcaccattctaatatattttgcctggctttcaacagctgcaataccagggtattttctggaggcaatgatgagcaagttattcttcatgatgtggagagtggtgaaaccatggatgtttttgctcacgaggaggcggtttatggtctttcagtcagtcctgtcaatgacaatgtctttgctagttcttctgatgatggaagagtgctcatctgggatataagagagtctactcaaggagatcctttctgcttggcacactatccgtcggcattccacagtgttatgtttaatccagtggagcccagactgctggccacagccaattcaaaggagggagttggactttgggatatccgaaagccacacagctctctgctacgttacggtgggaatctctccttgcaaagtgcgatgagtgtccgattcaatagcaacgggactcagcttctggccctgaggcgccgcctgccacctgtcctgtacgacattcactcacgcctacccatttttcagtttgacaaccaaggttacttcaactcctgcactatgaagagttgctgcttcgcaggggaccgtgaccagtatattctctctggctctgacgattttaacctgtacatgtggagaatcccaaccaatccagaagcagatggagcaggcagagtggtcaatggtgctttcatgattctaaaaggacaccgttcaattgtcaatcaagtgcgattcaaccccgacaactacatgatctgctcttctggagttgagaagatcataaagatttggagcccctacaagcaacccagctgcaatggagatcttgaggggcaagttgatgatgattcacgttgcttatacacacatgaggagtatattggtcttgttcttaacagtggaagtggtttgtcacatgattatgccaatcagtcagtgcaagaggacccaagaatgatggctttctttgattccctggtgaggagagagatagagggatggagttctgattctgacagcgacagtacaattctgcagcttcaccctggcgtcagtgagcgttctgcttatagtgattctgtatcttcaacctctttaccaccctcaccagttgccacaccaggagaatctgatgaggccgccactgctggagactcacagagatctgcagagtctcctccaacaaggtctgagttttctccacaccagttgagaatgttagcattgaggaagtaccaggataaacgtctggccacaatgtccaacaatacagattctgatgataatgcaactgagacagaagccgaaaccgagccattttctcgtcctcgctctccaagtcctgaggaagaaagatccagcagcagtgatgaagaaaacaaccttaacgatcgccgagccacaatgaggcaacgtaatgcaatgagacatcaacagaaaatacccagtgagaaaaaggctgaagcaaaatctcaaagcacccctgtagttgttggagaagatgtgtatgactatccacatattacagtggatgaccagtcaacatctgcagagtcttcccctgaaagaaggagccccagtggagtagaacgtaaatcctcactctgttcagagattgattctgtagagaggaagatctataaagcatacaaatggctacagtattcttatatatcatattctaaaggtaaggaaggagaatcctcccacaatgggggagaaagtgaggatgtaaggccaggtactagtgggaggagcagtgttttgccacctttattagaaactgaaagctcaaatgaaatcacttcacaagatagcaaaactcctccatcagaaggtctacacaatcagtctctccagaaagactccttacaagaaagcagcagtccaagctaccacagtggaaaaccgttatggcttgaggatctagatacatcttcccatgatactgcttctgtagattgtccttcagagacaaaaaagttgaatggaactgctgcccataaagagctcactgtttgctctgaagattcttgtgggcaatgtggaagcagcatgacactgaaaaacagccaaaaccagcaaccaataataaacccggaaccccctttatccacaaaagagactcctgcttggtttaaatgtagcatagacaattgtttggggagagggaattctgaaatagaaggggaagaggcagatattccttgcactcaccagagcaatgggcacttgcattcttttccttcagtttccagtagtgaaggacagagctgtggagaacagaccatgaacattgtctgcccacatacttatgccaatattgacaatgtcagcctgcaccaggcagatttaaccctgcataaggaaacatattttatgggagtcagctccagtatgagcacaaaagatgacttcacagatcaaacagacaatggtgatcacaaacttccaagtggactcaaaaggcactggcaagagcatgaggaatctggtgattcttcaccagagaagagaaggaaaacctaaattaaattgttttcctttaccatatgtaagaactaaaagtgtccagacttggtctggaagatgaatggctgagtgtatctgagtctccaggccattcaaaatttggctctactggccaaaattcagtttgcactaaatataaacattgcgtcttctgaaaatatttttataggaatttcctttctcctttctgaaattcaactagccattttcccattatagggtgtttattctaaggagtaaaccatgggtgcttcataaattacttttactctgtacctaccatactctgtggttatcatctgattggagtttgttttgctgtgccataaaagtgatcagtaactggaaaaagagtcgtaccatcacccttacaaaaaacaccaatatttttatttgtatgtattgccaaaccaaataatttctgcaagcagtgcttacactgactaaacacttagcaagcaacccagcagattaaagagaagaggcttctttccctcttgaaaaaaaaaaaaaaaaaaaaaaaaaaaaaaaaa

SEQ ID NO: 561 - DNA, 4805 bp, Xenopus laevis
ggataatgctgtgtcttggaacctttatttggcaaatgtgtgccttaatccagcgactcagcagaaattaagacaaaaaaaaagaggaagaaaggagcttcataacagccagcctcttctgttttccatagcatgaaccatgagccaaagtcaccttccataggaatgctttctacagccacacggaccacggccactgtcagtcccctcactccctctcccctcaatggcaccctggtacccaatggcagcccagcggcgaacagcgccctatctgtccagtccgcaccctcctccagctttgctgctgcgctgcgtaaacttgcaaaacaggcagaggagcccagaggatcttcaataagcagtgagtcttccccagtctcatcgccggctactaaccacagttcacctgccagcactccgaaaagaggtcccatgggtcccatcattgtaccaccaactggtcacagtgtgccaaacacaccacctgtagtaacaattgcacccacgaaaacagtaaatggagtatggaggagcgaagcccggcagccagatgcttcctcccgagccagcagcctcagcagagaacgacttctatctgaaccgcaactgcctcctgagaagagtggcgcaacctctgtcccctcccacctacttggaaatgcttatgcctttgccattccacccagcgctgttgtacaagatgcacgctttcagcccttaaacttgcagcggccattgcctcatgtgatccctcagagtgcagtcactgaggaatatctgcgcagtttccgcccataccacacagctgaagatctccgtatgccccatattggcctggatcctgcaactgcggcagcatattatcatcccagttatctggcccaccacgcttttcctcacccagcatttagaatggatgattcctactgcttgtctgccctgaggtccccgttttatcctcttcacagccctggatctctccctcccttgcacccatctatgcaccttcacctccgttatcccacagagctcacacattcatcattgtctgcactgcagtcagaacgcatccagagccttacagcagagaggcttcaaatggatgaagaactaaggcagcgagaaagagagagggagcgggagagagaaaaagagagagaagctgaccgtgagagagaacgggaacgtgagagggaaagggagcgggagaaaaaagaaatggagagagagaaggaacgtgaaagggagagggaaatggagagacaacgcgtaagattgaaagagaaggaggccagcctcatgaaaagtatagagaaccaatttctgcctgaatcagaggtccatccactcaggggtcatcaagacgagcgcccaaaacctgctgaacaggccacctcaaacagacatgagaagctgaaggaatccgctatcccatcttctaagcttgtccagcaccctatacagcaaccccagggcacgcagcattctatacccagcctcatttccaatcatgctcccttcactccacccaacaacagtgcagcagcctccattctggcccagaggacacaggaagaggaaaaatggttatctaggcagcgctgtctcagacaggagaaggaagaccgccagtaccaggtctcagaatttcgtcagcaagtgctggatcagcagttggacattggagggcgacctcttagcgaattggagactgaaagtaggccagaaaatatcagaatcatacctggccgcagtgaggtcactgtccgagagcagttacagcattttggaggtcctccaccacttatctcccctaaacctctgcagcacactcctccaacttcactgtggaaccctgtctcactcatggaaagctctacagagcaccgccgtggccaagaatccctgccaaatcataatcatactgctactgtctatgaacctaaccgacacacgttgcctccagttaaggtagagcgttccttttgttttgagaagcaccaacaggaagacgaagagttgtcaaggagaagggagttggcagagaagtatcaatcacaaagagagtcttcagccatggaacatgcaggttacacgcatactccattcttagctgagctagaaaagtcaactcaaacatttctgaatcagcagaggacctccctccaacaatctggacaagcagctgaggtgaacctgcatcacaagcccagcacgtcatatcgtcaagccccatcaaggactcgtgatccaatgtttgtgtatgatgaattcctgcaacaacaccgaaggctggtcagcaagttagatctagaggagcgaaggcggaaggaagccagggagaaaggttattactatgatcttgatgactcctatgatgaaagtgacgaggaggaagtgagagcgcatctccgccgtgtggcagaacaacctccacttaaactggatacttcttctgagaaggtggagttccttcagatctttggccttacaactcagcaagatagagaacgacttctgcaggagaaaagaagaaagaggaggagaatgctccgagagaggagtcagtcgccaccaactgtgcagaataagaggcagactccaccaccgcactcccctctttcaacaaggtttagccctgatgatctcaacaagagcccaaatctagaggagaagaaaaaatttcttacattctttgaccttgcacatatcagtgctgaacgacggagagacaaagaaaagttggttgaaatgctagaagctattaaacagaagaaatcagaggctgaggcatccaagactgcaccccaatgtcacactcctcctgccccccccacagtggcagtctctgaagaacaggtggcatcacaggcttctgtagagtgtgacagaccaccgtcccttccttccacatcaggcacagtgccactaccagagccagtaaatcctccagaagcctgtccatcagatcagaaaaagcctttggatcccattaaggtccctcctctgccttttgctgccccatcagctgcttcaggtgcaccagccacagagaagccaaagcaaagtgaggttatacctgcaaaaaggagtctaagtatcttgaactttgtacgggggaagccaccaaaggagagcactgtatcaccacctcagagtgtgaatggaagaagcaagtcttgggggccatttatagctgaggagtttgcacaccagtttcatgagtctgtgttacagtccacacagaaagccctacagaagcacaaaggagtttcagctattcactgtgcagaacagaaccacaaaccagatgcctctgttcattataacattcctgaactgcaacactccagccggccaaccgcaccacgtcagaacgggcagcaagtgccgggacaggcagtagtagggcacctgcaagcacaacaagagaccagtactgaggaagaaacaactgatgaagaagaggaggaagaagaagagccacccagacctaagtggcaggggattgaggcaatattccaagcctatcatgaacatgtggaagaacaaaacctggaacgacaggttctggagaagcagtgtaaaagactagaaacccagcactataacctgagtctgacagctgaacagttgtcgcaccgcatgacagacttgatgagccagaagcaaaaagtggcgtcggagagagagcgattacaagctgaactagaacactttaggaagtgccttgttttgcccacaatgccgtggtctagaggatacttcaaaggccaccacaggtgacatcttgtcttgcactaggtttccttgtacagtatagaaatatctattttattatcttgatatttaatatttttcactgggaggattgacaaacgccaccccatttctgtcacattctgcaccaccctgggagaaaaacaaatcaaataaaaaaaaaacaaatacatacaatataaatatatgaatgtgccacgcatgattacgagagattggcaaagaacagacctcagtcaaggcaaagccgtgggcgttttctttaccatatgatttccctgtcggcaccacatcccataccagggtccttcgttgacagacttttggctgcatctgacactacaagcaacctagtgtgctgtctggactgtaccaaagtgggggcttacctttctgaatccacccttcattgccattgtccttcaacctgaaaccaccttggactgctttatttatcactgattcctcgtgtccttgccacaaaaaggaaagaaaatctatgactattatggtataacttcttttactatgctgaagttggaagttaaggatatatttctgtaacattaaaggcaatttgtccacgcggagctttgcagcttgcaatgggaatgcacttaaacctggatctccgattggctgatggtaccttttattaaatacctgtcacatggtcgaggttcactgcaaagctgctacacacctcccataagcaggcgaaaggaaatcgattgaaaatctagacatatactgatcaggtgcttcagtctcagactgtatatattataaaaggttttttttttgtaagttttaattgctttaattattgttataaaggaaaaaaaactgccattttcagcgcttcagcatttttttttttcagccagaggaaaatacacgtcacttttaaagttgctatttagtgtttgtattctgctgctggtcaggaatttatcctatcaaaagtctttttgagaaaattaaaagttggaaagagaaaaaaaaaaaaaaaaaaaaaaaaa

SEQ ID NO: 562 - DNA, 1633 bp, Xenopus laevis
gcaagttcccctttcgtgtcttcacattaaaggagacaggcagctccaagcatgagccgaggggggcctaaaatgggagcccgtttgcaggacaatatctcttccagtctcctcttgccccaggagaaccagaaattattccagctgcttggacggaagtgcacgacactggcaaccacggtggttcagctgttagtggcgcaaggcagagatcggtggacaaagcaatttgtgggggtcatgtgcttggtgaaggacaatcccaggcgttcctacttcttccagctgtttgacctgcgggcagagaagatggtgtgggagcaggagatatacgagcagctaaattacaacactccccgcctctacttccatactttatgctcaaatgattgccagactgggctcaattttgcagatgaggttgaagctgcagcttttcaattggttatagaagagaaactaaagaaaaaacagcacagacaagacagacgacagaatttacctcctcctcctccagtatcagatgatcgacggacctctctacccctaccgctaccaccaggacctttccctaatggacccaccagcccacttcctctggccccctcccaaagccttaacatgccagcagtcagcattcccaacccagatgtcacttctgccaggtaccgggcattgactgcaccctctgacaagggcaagaacaagaaaggcaagaagaagttctccaaggccgatattggggcaccaagtggcttcaagcatgtcagtcacgttggctgggatcccaacagtgggtttgatgtgaaccagctggatcccgacatccgtgatctattcagtcgtgcagggatcagtgatgctcaactagaagatgctgaaacctccaaactcatctatgactttatagagcagcagggtggggtggaggcagtgaagcaggaaatgaggaaaggagagcctatacctccaccacctcctccttcccgcaatgcacctccagcaccttcccagagtcgcggaaggactggcccattaccgcctcctcctgttcgtggatcaagtgctcccccacttcctcctccatcccgaagcaccctacctactccacctccaactgtacgctctggaggtcccccacctccacctcctccacccccaccatcagccccagcacttcctgcaacaggtggcccagcacctcctccacccctgccagtaagtcagagcaccccatccgcagcaccttcaggaggacgtggagcccttttggatcagattcgtcatgggatccagttgaataaggtcacagattctgcagaacctcctttatctcctcagcccagcactgagggtttagtgggggctttgatgcatgtcatgcagaaacgcagcaaagccattcattcatcagatgatgatgaggaagatggagctgatgatgatgacgatgatgaatgggacgactgattgttgctttttctctttgactactgtgatttatccttatgaagggacccgtaatgagatactgccaccaaaataaatgtggcccgaaacgttgccctgtttgaaattctttgatacaataaatttcacgtttgttcaaaaaaaaaaaaaaaaaaaaaaaaaa

SEQ ID NO: 563 - DNA, 1946 bp, Xenopus laevis
cgcaggaagcagacgctgcagtgtgtgcagcttctagttttgtgctttctgaggggcgggggaagatggaggcgctgcaccggctcaggcagtttgatgcctatcccaaaaccttggaggactttagggttaaaacatgcggaggggcagtagttacagtgataagcggccttatcatgctgatacttttcttctcagagctccagtactacctcacgaaagaaatctacccagaactatttgttgataagtcaagaggagataagctaaagatcaacattgatgttatcttcccacacatgccttgtgcttatttaagcatagatgcgatggatgttgctggggagcagcagcttgatgtggagcataatctgttcaaacagcgcctggataaagacaaaaagcccgtaacgtcggaggcagacaaacatgaactaggtaaattagaagagcatgtagtacttgatccaaaaaccttagaccccaatcgttgtgaaagttgctacggagctgaaacagaggacttcagttgttgcaactcttgtgatgatgtgcgggaagcttaccgaaggaaaggctgggcatttaagactccagattccatagaacagtgtaaaagagagggctttagccagaagatgcaggaacagaagaacgaaggatgccaaatctatgggtttcttgaagtgaacaaggttgccgggaactttcactttgctcctggaaaaagcttccagcaatctcatgtccatgtacatgatctccagagctttgggcttgacaatataaatatgacacatgaaatcaaacatctctcatttggaagggattatcctggtcttgtcaaccctctggatgggaccagcatagtagcaatgcaatcatcgatgatgttccagtactttgtgaaaattgtgccgaccgtttatgttaaagtcgatggagaggttctacggaccaatcagttttcagttaccagacatgaaaagatgaccaacggactaataggtgatcagggtctacctggggtttttgtcctgtatgagctctccccaatgatggtaaaactcacagagaagcataggtcgtttacacattttctaacgggagtatgtgccattataggaggagtgtttacagttgcaagtctcattgacgccctaatttatcattccacacgtgccatccaaaagaaaattgagctgggaaaagccacttaatgaaaacaaaaatgataacaactgcaccttcaagctggcaagagactggtttctctgcaagggttctctgtcgaaattgggaacggggatattctaaatgtcaggatagaatgtgtgtgtgtggtggtccacatgcagacaccttactggatagggacaagaccttaagccaggaaactaagagaaacgtgagaggaaacttcctcccaaggaaattgtaaccatattatgtgcaactgtctttttggaaatattgagcagctgtgtcctctgtgttatgtctgtgttccagtttacattacctataagggacgagcactagcaaatataaaagatggttgtggatggggcgctgtaattatgaggagcttccaacttccagtttttgctgctttcccataacagcttgggtgattcaccaacactgctgcagcaagatggaggatgtggagctgatcccaaggaggacattcatgctttccagtaatggacacttaagcaaatttaaagaaggtaccaaagcatcagacccaaacacacacacattgaggaagaggttatatgttaatcagggctgttggagtggaaatttaaaaaaaaaaaaaagacttttctgttcctataagatcttgctggcattggtggggatactctgtaaaaggttcttactgtaagaaataataaattattttgctgctaaaaaaaaaaaaaaaaaaaaaaaaaaaa

SEQ ID NO: 564 - DNA, 1623 bp, Xenopus laevis
caaagagaatgggtggatctacgcgtggtaggccgctggaagctaacttctctaacttttaataagcgatcagtatagtgattatttattcactagacgagctgagtggtatatacgctcaaaggctgccaataaaatcgctaagcccggaatcggtattacccttccgcagttggtgcggtcaggggacagaatggcggtgctggggtcctggactgcccagcggtgtctttgggagaatggtggtcggtcgttactccgagctgtggcccagtcgggtccgtgctgcagccaccaagctaagcgttacctgttaactgacgatatcttgaaactgcatgaatttcaaaagaagaaactggctactttatatcagatttatgggaaaaaagatctgtattttcaaatgatagaagataagctacagcgaaatggaatcatcctacgagatgagctaaaaacactacttcacctatgtagcactcagcctgatgtggaatttgcaaagagggttatatataggtaccatgcagaaaataaaaatgtaatgtttggcgaattccgatttggacctgtttttcttcgactgtgttatgaacttgatcttgaagatattgcccttgaccttttaaaagaccagactctacgtggttttttttctgactgcacctcctttaatatattgatggacatgctcttcactaaaggccagtatgaaagagcggtggaagtgttagtggaaatgcgaaatcagagggtgaggtttagcaaagatacctacattttggcatttgctgtatgttacaagctgaacaaccccaattcctgtaaaatctgtacaactctcctagaagaaatcgagatgacgggagatctgctcccaaagcaagcggcctgctttgctgcggcttttgccttaaaacagaatgaatttcagagagccaggacaatttattctaaaatcatgaatactgataccaaactgtgtaataatttacttcttctcattaaggtgcacactagtacaatggaagatgttctacattttctggaagctgcaactggaaccacaggctctatacttgtgaagaaacttgaattttctgaggaggtgttggcctccgctgggcagaagctgaaatctcaggctgaacttcacacaagatttaacagtgtttatcagagactgaaaaatgaagggcaaataagtgcattaactctggatcaaatgctgtgttatacttctcctgaactgagacacaccaacgcgcatttactaagaaataggaaaatcagccacaggacatttcgatctctacagtctacactattggtggagtaactgagactaagtcacgctctgctgtttctggatggaaagaatcctcatatatatctatggcgacttgagcacttgaagtgaaggctgcagtgtagggatggaaatgtgaattcggactacaatgcagacactcaatatatgagtaaatatttaaaactttaacaaaatatttggataaaaaatgcttctatttaagaagccagttctttttaaaaaaaaaaaaaaaaaaaaaaaaaaaaaaaaaaaaaaaaaaaaaaaaaaaaaaaaaaaaaaaaaaaaaa

SEQ ID NO: 565 - DNA, 1414 bp, Xenopus laevis
gacacaaaagcagcaaagaagaaacgtcgcagcctctactgtactctcagcttcagtctctttgtctctggctaaagaacactttttggtagccaagatggaagaatcccagaatggtgtacaatatggcgaagatacagcagatgcaaaaacatattttacaactcaacaaataagccttcaaaatgctgatctaaaagaaatggaaagaaaaactaagtttgctcatctcttcaagtacagaacagattacccagagatgggagtttgcctcatcattaacaataagaactttcattcatctacaagcatgaccgtacgaaatggaactgatgtggatgctcgcaggttacatgaaactttcacaagtttaggatacaaagtaaaagttttgaatgatcaacggtgtaatgacatatttggacatttgaagaaaatgtctgaggaagatcatagcaagagaagttcctttgcttgtgctattttgagccacggagaggatggtttaatttatggagttgatggtcctataccagtaaaaaatctaacggatctcttcagaggagaccgatgcaagactcttgtgggaaagcccaaaatattcttcatccaggcatgcaggggaacagaactagattcaggcattgaaacagacagtggcagtgaaccaggggaagagacccatcggattccagtggaggccgacttcttatatgcctattctacagttcctggtatgagaattttggctcttcagcacatatatggtttgaagggaacatatatgtactatttaaatggttaatttgtttaatctatttttcttctagctcgactgacaaattgatccatagctttttctgccagagaaaattacttaaaatggtcgtttgttttctggatagttggagattaatagttgttatatgctgttttatgaatttatgtatgaaagagagtattcataactattatattgttacaatttgaataatcaagggtttgattctctctattacagctagaatgttttatcaaattacactgatagcagtaaaatattataatctttacaaaatgtgggggcatttaggtatttgaatatcttgggttactgttttggaaatctcgagaccgaaggaagctgaattaaaggctgtaattgattacagtttgttgtatgctgtgcatattcgattcgttccttcaagaactggagtagatggtcgttttgtagaatgagttgtctgcctattccttaaaaacagttgaggacatttagagaattatcacaaaggataatgtgtgccaggagggcatttgaggggatgcttcagaacaggggcactgttcaattgtaaagaggtggggagcaacacaagcttgggaaaaaaaaaaaaaaaaaaaaaaaaaa

SEQ ID NO: 566 - DNA, 2138 bp, Xenopus laevis
cacaggaggagaatcgacaccgctctggattacacgcagtcctattgttgcctgggattatatttgcccccattgctgtttacactataaatctgtctgtccgaggaattgcacagatcatccaacgctgtcaccatccttggatcctaccctgtagcaccctgtagcttcctggcgaggagagtgtgagcgtgacaagaggtgtccagtagcagcagcagagaatgttggaaagcagctgtaaggtggtgaaggagggactgctggagaagaggagtgatggcttactgcagctgtggaagaagaagcgctgcattctcaccgaggaaggacttctgctcatccctcccaaacagctggagcagcagcaacagccaagtcagccagccgagcccgcaaggatcaaggagctacacttctccaacatgaagacagtggactgcgtggagaggaaaggcaaatacgtgtatttcacggtggtgatgacagaggggagggagatagattttcggtgcccgcaggaccagggctggaatgcagagatcaccctgcagatggtgcagtacaagaacagacaggcgatactggcagtgaaatccacccgacagaaacagcagcacctggtccagccgcatgggcaccgcatcaggagcgcctccaactctgcatagctgcctgcaactgccatccactcatctctgccatctgattccaggtctaactgaaaaagcactttaatgggcatcgcaagtatttttgttcagctcatcttatagacacattgtggaaaagaactgtaccaggctgtttcggtggatgtaagaagcatacagtgccaggccgctaagccagacgaatgattggtgttttccttggaccattggaagcatttagtaaatgggaaaaatacaagaagcagatgtactttcatttttttgtaatctatttatttcttcaatttctgctatttgccaaactccactgcattttgaccacaaagtcaaatgtaaatgaatgtatgcaataagtggcgcgcagtctgactcaccagctgcccaagtgcagaaggagaatatatcttattaaactatccataaggtagtcaaagggcacaacggaattcatttgctatttgcagaagatacaagcaagcggttctgcagagctccacaagtcatcttaagccttataatatttttattttccattgccgaaaaatcaccaagagggaaagagaagggaaaaaaaaaatcaaacagtggttttgttaacaattctcagttcatgttgatatttcatttgttcgtgttgtcagagggatcagccacattcccttgctcttcttttttgccagattacagcatcttttggttctgggcaggatccatgagctctttggatcagcagtcttgggtcccacccagatttcttttcagagtccatagcagctctgatgcctcgtttctgttatgtagacgcactctctgcttattggaccaatgtgtatcttctgtggtgttaagtgtaatcagccttcagcatcgttcccatggacatttcagggaattttaaggtttataaaaatgaattgtgggtaggagaccaatgtggtacaagagccatgttctaacactctggacttaccaaaacagagtgctctggtatgtgtgtacagtgggcttgcatctgaaatattctgtaacataactccaagggggaattatgacttttagcaacttcttatgtgtaggtgcatgtgttagtaattgaaggtaaaacataaggagaaatcaactaaatgaagttggacagtgccttgcacctatagcatagcaactcataaacaaagggatggtttgatagatgtttatgttgccagctcactgatgcaatattttccatctaatatcaatctgtcaatattttaaatgaacagaatacatcattagaagtgttgcctcccctgataactgtatgttaatctgatatattatgcactgataccactgaatacactgctgtttcagttgtgtattgatttattcatgttgtatatattatttacaaatatccaactaaaaataaattcctacatttttaaaaaaacaaaaaaaaaaaaaaaaaaaaaaaaaaaaaaa

SEQ ID NO: 567 - DNA, 2481 bp, Xenopus laevis
cttcactctctgtttcagtacattaatttcaatttaattttgacccaaaatgagtcagtataagcagtttagtgttcgatcagtagcaacttcaggcaaacctggcttcagttcattttccgtggctaagagtggtggaggttttggaggtgcttcaggaggaggtagttttggtagcagaagtctttacaatgtagggtctagaaagatcagttccgttagttctgcaagtggaggtggctatggaagtgcagcaggtggttttggtggaagagtcagtggttttggtggcggagtaggtgggggagcctttggaggagctggtggtgcctttggaggagctggtggtgcttttggaggagctggtggtggaggctttggaggttctggatttggaggctttggaggtgctggatttggaggctttggaggtgctggctttcctggtggaccatcagctggtatacaagaagttactgtcaaccaaagtcttttggcaccactgaacctggaaattgatccaaccatccagaaagttcgattggaggagagagaacaaattaaaactctgaataacaaatttgcttcttttattgacaaggtccgcttccttgaacaacagaataaggtacttgaaactaaatggaccttattgcaagaacaaggaggccaagttaaggggtcaagaagagacaacattgggcctctttttgatgcctatatcaacagcctcaagaggcagcaggatgctttgcaaaatgataaactaaggcttgatggagagttaagaaatatgcaagacttggtcgatgacttcaaaaacaaatatgaagatgaaattaataagagaacatcagcagagaatgagtttgttgttattaagaaggatgtggatgctgcttacatgggcaaggtggaactggaagccaaagcggatgctttgacagatgaactcaacttcctgaggaccttctttgaagccgaacggggtgagttgcaggctcagatctctgacacctctgttgtcctgtccatggacaataaccgagctttggatctggaaagcataatttctgaggtgaaggctcagtatgaagatatagcaaagaagagcagagctgaagctgatgctgtttaccaaggcaaggttcaagagttgcaagcatctgcaggtgaacaaggagatgtcctgcgcaatacaaagaatgagatctcagagctcaaccgtaaatcccagagactaaaagctgaaattgaaaatgtgaagaaacagatcgccaagctgcaagtatctattactgaagcagaggaacgtggggatcttgtactgaaagatgctcagtccaaacttgctgacctggaagccgctctgcagaaggccaagcaggacatggctctccagctgcgcgaataccaggaactgatgaatgtgaaactggctctggatgttgaaattgctacttacagaaaactgctggaaggcgaagaattcaggcttaattcagatgtcaataatgtcagcatttctgtcattagctccggtggcaaaagttccctaggaggaggaggaggaggagcaggcttcggctttggaagtggtggtggtgccttcggtggaagtggtggcggtgccttcggtggaagtagtggcggtgcctacggtggaagtggtggtgcctacggtggaagtggtggtgctgcctttggtggcagtggtatttcctttggctcaggaggtggaggattcagctcctcaagctcctcatttggtggtggcgtcagcagtgggaggttttcatcgagtcagtccagctacaggagttaatcaagtcaagaaatgaggccagaaatcagtgcccagaacacacagaatcattcatttgcctgttaatacaaatactgattgctgtaaacatgttgttccgcagaacctatccccatgcctttctcttttactaaagcacacgctgtgtagtggaggatgtgaatagaatttccagcagaaagtggctttagctttgccatgcctccactaaggcttgtcctcaataaggggctattattctatgctcgtccatcaagcataatcttgtgcaggagaaaaaaatgataaaataaacataataaaaataatacaatgaaatacacatctctcccaactgcaatttaaggattcatctcatctgtgactctgatgccccatcattgctttacaaaggtaaaataatcaatgcagatacctgcagtggcacaaacagaagcaaacatgaaaagtcattatgaaacattggtcacctctatttcctacatttgcaaatccctctcaataagggatactgttatgtttctgtagttgtccactgactttaatcattgtagcacaaataaacagaattctgctgcaatataaaaaaaaaaaaaaaaaaaaaaaaaaaaaaaaaaaaaaaaaaaaaaaaaaaaaaaaaaaaaaaaaaaaaaaaa

SEQ ID NO: 568 - DNA, 1440 bp, Xenopus laevis
gtaactgcctgggagctgctctgagatatcggtgcatcagcccatggcactatggccggaaaactgaagtgggtgacggacattgagaagtctgtgctcattaataactttgaaaagagaggctgggtgcaagtgacggagagtgaagactggaacttctattggatgagcgtccagaccatccgcaactgcttcagcgtggagaacgggttccgcctctcggacgaccagcttgtcaatcatttcccgaaccattatgagctcaccaggaaggacctgatggtcaagaacatcaagaggtaccggaaagagcaagagaaagaggggagccccctggccgagaaagatgagaatggaaaatacctctatttagattttgttccggtcacgttcatgcttccggccgattacaacctgtttgtggaagaattccggaaaaacccctccagcacgtggatcatgaagccgtgcggcaaagcccaggggaagggaatcttcctcatcaacaaactgtcgcagatcaaaaaatggtccagggacagcaaaacgtcatcgtttgtatcacagtcatctaaagaagcctacgtcatctccctgtatatcgacaacccactgctgatcgggggcaagaagtttgatctgcgcctgtacgtcctggtcaccacatatcggccgctcaagtgctacatgtacaagttggggttctgtcgtttctgcaccgtgaagtacacgccgagcaccagcgaattggacaacatgttcgtgcatctcacaaatgtcgccattcagaagcacggggacgactataatcacgtccatggcgggaaatggatggtgagcaatttgcgtctgtacttggagagcacccggggcagagaagtgaccgacaaactttttgatgagattcactggattattgtccaatcgctgaaggccgttgcgcctgtaatgaataatgacaagcattgcttcgagtgctacggatatgatattatcattgatgacaagttgaagccatggctcattgaggtgaatgcgtctccgtccctgacatcgagtacggccaacgaccgcatcctcaaatacaacctcatcaacgacaccctaaacatcgtggtgcccaacggagagatccccgactgcaagatgaacaaacacccgcccagagaggtgctcggccactacgacttactgtacgatgaggaggcagcgcagttggatggggcggagcgagacctgaagagccgaggagggcaaccagctggtgtgaaaggcaaccgagcaagggattctgggagacttgccattacaacttggaagtaggttggccccgcccactgatgggaggaaatcaaccaatcatttttattttctcttcagtcctcaatgtacattctataaataacttattgtgcaaaaaaaaaaaaaaaaaaaaaaaaa

SEQ ID NO: 569 - DNA, 1776 bp, Xenopus laevis
cagaaacacaacaaccagcaccaagaacccagaaccaagaagaccaactctccagtgtcaactctcagtgtttcacaaaactaaacaaaatggtgggtctaaagccttctgacatccctcctaccccagctgttaagttccttggtgctggcacagccgcttgcatagcggacctcttcaccttcccactggacacagccaaagtcaggcttcagattcaaggagagtcaactgggtctgtagctgccaatggaatccgttacaagggagtctttggaactatgagcaccatagtgaagactgaaggagccaaaagcctgtacaatggattagtagccgggctccagagacagatgagctttgcctccattcgcattggtctttatgacacagtgaagctcttctacaccaatggaaaagaaaaagctgggattggaagcaggatactagctggatgcacaacgggggcacttgctgtaaccatagctcaacccacagatgtggtaaaagtccgatttcaagcccaagccaatcttcgaggagtcaaaaggagatacaatggcactatggatgcctatagaaccatagccaaaaaggaaggcataagaggcctttggaaaggaacttttccaaacgtgacaaggaatgccatagtcaactgtactgaactggtgacttatgatttgataaaagaaaatctgcttcactacaagctaatgacagataaccttccatgtcattttttgtcggcttttggggctgggttctgtactacagttattgcctctccggtagatgttgtaaaaaccagatatatgaattcccctccaggacagtacaaatccgctttaaactgtgcctggactatgatcaccaaggaggggccaacagctttttataagggttttgtaccttcctttctacggctgggatcctggaatgtagtaatgtttgtgtcttatgagcaactgaaaagagcaatgatgatgtcaaaggagagaatggagtatgccgtgtgatcttaggaatgaaaagaaaaccacgaaaagcttggactccaggatccatttcttacagttcattggcctgactccacattgctataataagtctggaaagccagtccagaaactctccttaactgttcctaagagtagtgagtgcccatcattagtgcaatgtcatggccaactgtaaaggaaaattctgaatgtttggaataagcttgcgctcgtctttagtaggatatcagtatgtttgctgtactttgagtacatatagaatttcgaggaggcaggaggaaacagaccaggccattcagtattcgttaaactgcaattacccaagaagctagatgatttagttttttttccaacaaaagaggttcggaagacgggccatatttattattttggaatttctggcgtattttacttgggatcagttaaagccactttctttctacataacattaacacacaacgattgcagtagttaaaaggcactttatgtttgctaacttcatcccaagagacttgccctaacaattaaatattgcagtccatcagagtaaaatagaagccctgaaaatgaagcccagacacaaaaaatatttctattgttatacattatttaaactgtagaatgaggaatgcggacactataaaaatgtttttttcttttatatatatattttcgttatataaattaaatgactaaatgatcataaaaaaaaagtttttttgtacaagcaaaaaaaaaaaaaaaaaaaaaaaa

SEQ ID NO: 570 - DNA, 1191 bp, Xenopus laevis
aacaacaaaagtgactgcgtaataagaagttgccgcctttttgatcagctggttagcggcttgagagcaaccaggaaacgggcagatgagctcggacgtgtgtgtccagaactggtcatgttcctattacctgacaagcgagaaacgttggatccccggcagactttccttaaccccgtcacgcctgaagtttaaagctgatggtgcacatgagtttctcgtcagcttccacctctccagcattaatgaaatcaaaaaagagtcttccagttatatctttagctccatcaccgtcctggagaaggaccaggccaagcactggttcagctccctccagcccaatcggaatgtggcgtttaacgttattcagcatttctggagggaacagttactgacaccccaaggatctcatacagcctcctccaaaacatcacagggaggtgaatttgttaacagggtcacggcatcccagagtcacatggaggaaagcaccaatgcgcttcttcaccagggggagcagtttgacaacatccgtaaaggtctagacaagattgaagcagacatggcgaccactgacaggctgctctctgtccttgagtctccatcatggtggctattcagcagaaaaccctggcagagctggaagcaggctgagcctaaggaatcacctggagacgtgactcccccaaatcatgggaaggaagggattctaatgagcgttcccataatattctcccgcaagccagacattaaccttaaaccagggaaactcacggttctgacgtccgccttggagatttccgactgcaactcacagctgcttcatcgctaccaaagggaagatgtggatgacatcacagtgtgcactggatatgacatcagcattcgacaaaggtttattgggaaaccagacatcacgtataaaatcttgtctgccaaactgccagatgtcatcccactgttagaaatgcagtacagcaagaagattgagttcctagaggaggccctaatgttcagtgggtccagaagatcctctccgagggatcagtctagtccagaaacaggcacacctttccctgttcatatttcagtctcttcttcaaaccactgcctggttgctagggtaaatgtaaccctagcaacccgagagttgctgaacaaaaaacggaataattaaaaaaaaaaaaaaaa

SEQ ID NO: 571 - DNA, 3612 bp, Xenopus laevis
cgggggtcagaggtgaaatcagatccaagatggcggtagcgaggaggctgctgggggctgctgtcgtattcactgtctgtcttattcctgcactgactgttgataggagcaacttcaagacatgtgaccagagctcattctgccagcggcagcggaggctgcaaccagggttatcttcctacagagctgcgctgggtagcgcaaagctgagttctgacaaactagaagttcagctcattgatgataaaaaccaggcctctcttctacttgaagtgtatggtttggttggaaacatgacccgtatcaaaattaatgaaataaacccactgaaacctcgttatgaagttcccgatgtattggtagggacgccactccccacaaatttgcaggtaacagggcaggatgacaacactttggaactctccctgggggaaacaggacacaagttgttggtgactgggacaccattccgcctggacatcttatcaggacaagatttggtgcttagtgttaattctcgaggactgcttcactttgagcatctgagggagaggaaagacactgacactgagaagaaagatgtgccggctgaaactgatgaagaaaaccctgaagaggtggaatcggacaaagaggaagagagcaagaagcctgaagttgatgagcctggtatgtgggatgaaacatttaaaacccatacagactctaaacccaatggaccatcctctgtgggcttggatttctctcttcctggatttgaaaatgtttatggtattccagaacatgctgataacatgaaattacgaactacagagggaacagatccatatcgtctctacaatttggacgtctttcagtatgagctgtacaacaccatggcgctctatggctccgtgcctcttctgttggctcacaatgttaaacgtacccttggcatcttctggctgaatgcagctgagacttgggttgatatcagctccaacatagctggaaagaccctttttgggaagatgttgcagtacatgcaaggaggtggggagaccccccaaacagatgttcgctggatgtcagagagtggaatcattgatgtgtttttgctccttgggccttctccttttgatatcttcaaacagtatgccagccttacaggtacccaggctctgccaccatacttctctttgggctaccaccagtgcagatggaattacaatgatgaagaggatgtgcgtaatgttgatgctggctttgatgaatatgatctaccatatgatgttatctggctggatatagagcatgctgatgggaaaagatactttacatgggatccccacaagtttcccaatcctcgtgatatgctgagcggtttgaaagaaaagaggcgcaagatggttgctattgttgatcctcacattaaaatagacagtggttaccgggttcacaatgagattcgagcccagaatttgtacattaagaccaaggatgggagtgattatgaaggttggtgctggccaggatctgctgcttaccctgatttcaccaaccctgaaatgagaaagtggtgggccagtatgttttcttatgacaaatatgaggggtctatggacaatctatttgtctggaacgatatgaatgagccttctgtattcaatggtccagaagtcactatgcataaagatgctcttcactggggtggctgggaacacagagatgtgcataatttgtatggtctttatgtgcaaagagctacgacagaaggtctgatccagcgttctgggggtaaagagagaccatttgtgttgacgagggctttctttgctggttcacagcgctatggtgctgtttggacaggtgataatgctgcagaatgggatcatttgaaaatttccatccccatgtgccttagtttgtccctggttggcatatctttctgtggagctgatgtaggaggatttttcaagagcccagagacagagttgctggtgcgctggtaccaagctggggcatatcagccatttttccgtgcgcatgctcatttggacacacctcgaagggagccttggttgcatggagatgataatatggccgtgatacgtgatgttctccgtcagcgctataccctccttccgttctggtacactcttttctacaaagcactaagtgaaggcgagcctgtcatgaggccactttgggtggaattcccctcagatgtttccacttttgctatggacagtcagtatatgttgggttctgctttgctagtacgtccagttacagaggccaaggctagaggagtgcaggtttatctaccaggagatggagaggtatggtatgatgtacactcctatcagagatatgaggcaccacagaccttctaccttccagtaaccatgaactccattccagtgtatcagcgaggaggatccataatccctcgaaaggatcgcccacggcgtacctcagattgtatgcaggacgacccattcacgttatatgtggccttgaatttacagggtgaggcacgaggagagctgttcttggatgatggtcacagtttcaactacgaacagaatgagttcttgtttagagaatttaactacagtcaaggaaagttgacagcaagttctctggaccctagtggtgtgtttaagactcctagttggatagagagaattgtcatcattggagcaacaaagccatcaagcataacactgagcctacaaggtggctcagaaagttctcttgaatttgaatacgaccagtctacatctgttataactgtacggaaacctggagttaatattgcatcagattttacagtgtcactgcgataacatcacagatcatgcatgccctgagaagaggggtaaaggagggccagccacttaccaaatttgagggagtgggtagcagatgttatccttggaccaaatgtgagatttaatccagtgtgtgtgtgtttaggagatgtgtgtctgtgtgagtgtatatatgtttgactgtgtgtgactacacaccagtcactgcacttatggtgtgtgtgtgcgtgtttagttggatcatgcactgtgtctgcaccccactgaacaatggcttggggtctgaaattggagcctctccaacgagttcaatgtctacagctagtccttatgtctcccttagtatgccttcccttccctcctcaactgtctcgtgccactggtcaaccggaatcagattgtttttaccaaagtatcaaatgtgagaagaggaagtggccatctttgcttgacacaacaagatttcaacttctcagggctgcagcctgtgaaagcaagtttagaactgtataaaaagggtttgttagaagcaagaataggagacctaacctctaacaaagcaagtcttctctctccccatggggactgctgtgtaaagtgatgaaatttgcggttatgatacagtctgtatcctccagtcaagtatccttaatgtgctgtgaagggggattcatcattgaaatcaaatttttttttttgtacaatctcctcatttcctgaacccttcatgcatttgacctaaaacattttgataaaatgagaataaagacctgaaattataaaaaaaaaaaaaaaa

SEQ ID NO: 572 - DNA, 2645 bp, Xenopus laevis
gtccagcctctcagcagatatggggaagaggcgaaagccccgcagggacgaggccattagcgctttgagtaagaagcagaagaaacacctgaaggaatttggggaacagcaccccttctatgatgcagtctccaaaaaacacgaagcaactcaagtcgttcagctgcctgagagctcagaggatgaatccagaagtgagagcgaggcagagagtgagccagagcaggtcaatatgtaccaccaactcctcgccaccttaaaaagcgtttccgacgaagaggaagatgaaagtgacgatgaggaagaagaagcagtagaagaagatgatgaggcagaggagcttcatgaggaatcggaagcagagaatgaggataaagaagatgagagtgaaggagaagtgtctggagaaggcgatggggaaatggatgacataactggagaggcggaggaagagggagaccatgatgaagaggaggatggagcaggggagccagctgcagaggatgctggggaattcactgatgcgaaacatgaatctaaatttagtttagaaacaaattttttggatgccgacaatgaggattctaagaacgaccgagtctcctgttccactgtggctacagaagacccatttgttcagcatgtcagcagggagttggaagagcaagacatcagtaagatcggcacaaatcctaaaaaggcatcactgaagtggccagccttgggtcagctggttatctcaagcttccttcctgaggtccagcccttaaaaccagagaaagaacctgacctgcacaagctgtatttgcacaagcctctcttctccacgtggcccaaagtaaacagtcccttcctgtctgctcctaatgaacagcatttcacccctctgcagaaagagcttttcagcatcatgaactcctacagggactttttctatccatctcggacccctacagcgcaaggcgaggagatcagacacgtgtactgtctccatgcgctgaaccatgttctgaaagcaaactcccaggtactaaataacaactcccagaagagagagcaaaaaccagggatggatgaagaagacctaagggaccagggcctaaccagaccaaaggtcctcattgttgtgccattccgggaatccgccttacgcatagtgcagattttaatcagcctgatggaggttggagaccggaaagttgacataagcaataagaagaggttcaaagacgaatttggatctgagccagaagacaggcccccaaacttgaagagacccgatgattatgaagccgtgtttgctggaaacattgatgaccacttcaggataggagtcgccatcttgcagaagagcatgagactgtactctcccttctactcctccgacatcattatcgcctccccccttggattgcgaaccatcattggcagcgaaggggagaagaagagggacttcgattttctgtcttccatagaagttctcattctggatcaaacagatttatacctcatgcagaactgggaacatgtgttgcacctgatggcccacctcaacctgcagcccacagagtctcatggggtcgatttctctcgtgtccgcatgtggaacctcagcaactgggctaaatactatcggcagacgctgctgtttagctccctgcaggagcctcagataaactccatattcaacaagcattgcttcaattactgtgggcaggtggcagttaggaacatgcccatcactggctctatcagtcatgttgtggtccagctcccacacgtcttccagagattagaggcagacagcttgctttctgtcatagatgccaggttcgagttctttaccagcaagattctgccgcagtatcgggatgccatcatgtctcatacgctcatctatgtcccctcctactttgactacgtgcgactccggaactacttcaagaaggaagaactgaactttgcgcacatctgtgaatacacgaacaagcccggaatctccagagctcggcagttcttcctcaagggggagagacagtttcttctggtcacggagaggtttcacttctacaagagatacacattgaaaggcatcagaaaccttattttctacgagctccctacttatccccatttctacagtgaagtgtgcaatatgatgaaggcatggcaccgtggagaagaggccacatggacctgcactgtgctctactctaagtatgatgcccagagactggctgctgtggtgggggcagagcgcgccgcccagatgttgcagtctaagaaaaacgtgcacctttttgttactggagaaaacggttaatttgttgctgaaacgttgagcctgataacgctgttgagtagattttgttcaaagccacttcagcatgaactaaatgtacaaacagaagaacaatgttcatttttgatctgctgaaaaggtgtaatttacattttttttcctgttcagctgccatctgcgcttgacgtgaggcattcagaaactcctctattgatatggaatgtaagaacgccccacaatagtgctgtgtatgccactttcaaggcaatcaaggctcctctccccccttgtgaaatccaccaataaatgttgcttagtagtaaagtcaaaaaaaaaaaaaaaa

SEQ ID NO: 573 - DNA, 810 bp, Xenopus laevis
caagaatcagcagaaacttccttcacgaacgccatgccccccaaaaagccagaacccaaaaaggaggcacccaaaccagcagcagcccctccacctgcagcaccggagcccccaaaggaaatcccgtttgacccaaagagtgtgactgttgagttcactgctgatcaaattgaagaattcaaagaggctttccagctgtttgaccgcaccccaacaggagagatgaaaatcacatacggccagtgtggggatgtactgagagctctaggtcaaaatccgaccaacgcagaggtgatgaaggttctaggaagacccaagccagaagaaatgaacaccaaactgttggactttgagactttcttaccgatgctccaacacatctccaaaagcaaggaccagggttcatttgaggacttcgtagaagggctacgcgtctttgataaagagagtaacggcactgttatgggtgctgaactgcgccacgtgcttgccaccctgggcgagaaactacaagagaatgaggtagaacagctgatggctggacaggaagatgccaatggatgcatcaactatgaagccttcatcaagcacataatgatcggataaagcctttgaacataatggacgatcctcccaacggctttcctccagaaaatggaatggaatgagtaaccctaggtgtccctgagaggaagatacacctaaaagatgaagttgtgctcttcagaaatgcccagttcggttgtacattttttgggatttttttttctcccagtgacttttcaccaaataaaaaaaaaaaaaaaaaaa

SEQ ID NO: 574 - DNA, 1436 bp, Xenopus laevis
agagtgacgtttttttggtatttaatgggggagagtctgttctccaatatataagctgctctgtgtttgttcgtcagtattcatgcttcccagtgctcccccaccactctgtctggtactttctgtatatttatgcttcctgtactgtatccctgtgtcagcacgtagagaaaccctgcagggtgtctggccagttctagccatagtctctcacatgtcattcctccagcaagacctaaagctcctgctctgctgctgctgctgtgtcatagccacatgggtgcctctcatcatggggaagaggcgctgcatatcagcaaccgagaacaagccatccttgggatgctgtggagtaaagaaacccaaactgtgccctccttctggcagcattcagccttctgtcacaaataactgccagcctcctgtcacaaataactgccagccttctgaagacaagacagtgggtccaggtgccctcaccccactctcccggcccaatgggaccgcaagagagcagtcagttgtgaccgctgaaatgggctgctactgctttgatgtcctctactgtcacctacatggtctcccacagccacgcctaccacgtttcaccaacgacccttatcccttgtttgttacgtggaaggctggacgtgaaaaacgtcttcgaggctgtattgggaccttctctgccatgaatcttcactcaggactcagggattacacgctaaccagtgctcttaaggacagccgtttcccaccacttactcgtgaggaactgcctaaactgtcctgctctgtgtctctactcaccaactttgaggatgtgggggactttctcgactgggaggttggagtgcatggcatccggattgagttcctaaatgagaagggaataaaacgcacagccacctacctgcctgaagtagcaaaggaacaagactgggatcagatccagactatagactctctgctcaggaaaggtggcttcaaggcacccatcaccaatgagtttaggaaaacaatcaaactcacaaggtatcgcagtgagaaggtgacaatcagctacacagaatatatggtttcctacaagccagtacagcagaacggcacagtgcatgcacctcctctgtatacacattactcctgacactgcgctgcctccatctcaatcttgtgacctcctgacatctgactcctcgcctgctccctcctcttggtccagttatctgtactactgcactatattataagcttcactggagggtggggagcagcccccagagactcacagacacacacagccttacctcaccccacgctctccaaggaacttttagtagaagggagagcgaaatgggtgtcatgacctactcaaacccctacagtaaaagaggttagctaccatggaaaaaaaaaaaaaaaaaaaaaaaaaaaaa

SEQ ID NO: 575 - DNA, 3906 bp, Xenopus laevis
catcagtgcagaatgagatcaggagagatgatcagtgtgtgtgcgctcttagtgctgggcctgaaggccagtgacgctgtgacagttgattactttgatttcggagcagaatattatcagacttacggcccctcaggggaatatctgtttgactatgaggggaatgagatgttccatgtggatttggagtcaaagtcagtggtttggacgctgcccgggctggagaaatacacatcatttgatccacagggaggcctgcaaaatattaatgtagataaatttaacttggatattatgatgaaagtatcaaactttacagcggcgactaacattgctcctttggtcagtgtctataccacaaagcctgtcgtactgggagaacccaacatcctaatctgttgcgtaaagaacatttttcctcctgtgatgaacacaacctggattaaaaatggagaaaaaatgacagttggatttagtgaaacaagcttcctgcctgcacaggaccactcctttggtagacttcattatctggcatttttaccaaatgaacatgatatttacacatgtgaagtggagcactggggcttagagaaacccacaaggcgtgtctggaaacatgatgtcccaacacccgtctcagaggcataccaaaatgcgatctgtgctttggggctggcagttggaataattgggataattgctggagtcatgctgatcattaaagggatgaagcaaagtgctgcacaagggaggagccagcactaatcaataggagaataggagatttggtttctactgctttttatttccaataaaactgtacattttcttctgcacataaaactcttactctgtaatgcagacaatgtaacttgaagctaaaagcagagaatgtggtagatgctcatacctctgtcttaatgaatcaacatagtttattttaattagattaatttaatgctacctcccaatgcaacatcattttctttggaaatccaatatattttaataactatatagaaattgtttttgtttagctttcatctgttcatttaacctccccatcgccatccattctgtatagggaagggccaaactgatagtagaccaaaaatgtttccattgtttctcagcaataggaagtttctagaaactagagagcaccaatggagagcaccaaatgaaattgtctaattcttgcaaaagtatatatatatatatatatatttgtatagatgtatactgcatgctttggggtgtttctgttttctttggtttcttaaagggttaagtttaaagggacgctgtcatctgaaagcatgttttttttttaaaatgcatcagttaacagcagtgccgggccacgctgggcaggcgccctaggcaggccaggcagtcgcggcgcctgtttggtgtacgcatgtgcaaatttgcggtcacgtgcgcatgcgtgcatttgcgatatagtgcgtatgcatgaggttcgcgtgcatgtgcagaagcgcaaaaagcgtgaagtaacgggcagagaagggaaccggacttggggtaggtgacagaggaggtacgtgcctggcgccctcccagctttgcgccctaggcacgtgcctactctgcctacccctagttccggccctggttaacagtgctgctgctgcagcggacttctgcactggggtccagttctcaaaggagcaaacagatttttttgtattcagttttgggatctgatatggggctggacgtgttgtcggtttcccagctgcccccagtcatgtgacttgtgcctgcactttaggatggactactttctggcaggctgttatctctcctacttaatgtaactgaatcagtttcagtgggacttggcttttgctattgagtgttgttcttagatctatcagagatctggttaccttaacattgttctaggctgctgggggggaggggagggggatgatatcactccaaattgcagtgcagcagtaaagagtgactgaagtttatcagagcacaggtcgcatgacggggggcggctgggaggctgacagtgtgtctggccccatgtcggatttcaaagttgaatgtgaagggatatgtttgctcttttggaaagttgatttcagtgcggagttctgatggagcagtactactaactgatgcgttttgaagagaacatgttttcccatgacagtatccctttaactttaaaatgcttttttcattcaatggtacaccaggaataatgacctcatcttttcccaatttttagttcaaacttaaatttcctcattctgtgtttcctagtaatagtttagtaagccacatgcagactctttgctgctttagctagctaaaaccttttaaacgaacaaaatgtattgggtggaaaaactgcctttaataacggagggattatgctcaattaaaaaatgttattaactaatgtatcaaacagtttagagagtttcatattttgatagtagccctccttactaatttgccaagctccgaatttatctcagtaattttaatattaaaatccgagcaactacaaatttccgaatggaccttatttatcattaaaaaaaaaaggtttgggcaaacttcggagctttgccagaaaagtcagaagttttcgactttttcgcaaaaaacacacatttttccaagttttggactttttggcccaaaatcgtcggatatcggtactgacagcagcgcagacactgggaccttccccattgactaatgcaggatcccgagagctttgaggtgcctggttttcagattcagcgttttcataccatcggacgttaataaatcaaaaaaaaatctgtttttttaaggtccaaaagatccaaattcttcggatttcggtattcagagcttaataaataaccccctaagaaatgaggaagtgatgtttctgttctcctttgttttactgtcctgttgctctggatgtgcctaatttacacaaacaaattagaaactgttcctattgcccacaaaatattctctgctaaaatgcataaaatatgaattaattagtttttaaattagctgttttagatgtctgcatctttaaaattgtttgaaaattacatttaaagggtaactgtcatccttagaaataattccaatttgtgtttctattcaaactatttacattttgtttccttcacaatcacatcaagcaggcaggcaccattttgcatcgtacttaaatcttgtttatgtgccagaatggatgacctgattcccatgcccacaaatatagagatttttaaatgccttgataacaggtatgaatgtattaataaaaaaatattttatgtttatgtttaatttaaaaaggacttttattgggcagctttttatgtctggatgacaggtccctttaattacaatctcattatttgtaatgcttttaggttttgtgtgatgatttaaaatacaatatattgttggcaatgcagatcaatatgaaagtatcaccagctacagggaactcctttcaaagatttttattgaattctgaaattgtaatattctttgtttattgcttttccctatggtctggtggcttcaatgcaccagtgtccagatgtgtccagtgggcagttatcaatcatatgctttcttgtgtttttaaattttataaataaccccacttctctagatagtgtatcaattaacttaaataaagtgcttcttccactcaattcattcaccacttgattaacaccagtattttggccctacaccctgtgacaaataaatataaagtgcttgtgcttaattttatacaaccaataaaatattgattgtcgctaaaaaaaaaaaaaaaaaaaaaaaaaaaaaaaaaaaaaaaaaaaaaaaaaaaaaaaaaaaaaaaaaaaa

SEQ ID NO: 576 - DNA, 1109 bp, Xenopus laevis
ttcaacagcagctcatagtgtggcagaaacaatggagttttgggagtttgctgggatcaccctgcttctgttggtttctgcaccccccacattctctcagaatacaacgtctaccacgccgacatgtggttctccattggtttcgagtaggatagtgggaggtactgatgccaccaatggagcatggccttggcagatcagtctacgctacagagggtcccatatctgtggggggtctctgatctccaaccagtgggtcctgacagccgcccactgctttcaatattctaggtctccagcggactatcaggttcggcttggcgcataccagctatcaatcacaacttctaatgaaatcatatccaatgtagacagtgttcttgtcaacccattgttcactagcccaggaggcccaggagatatcactctactgaagctaacaagccccatcgcctataccgagtacatccttccagtgtgtgtgccttcaacatcccagagcttttatgaaggcatgcaatgctcggtcaccggatggggcaatattggctctgcagtgagtctttcatatccacagaccctccaacaggtgatgactccactgataagttggaacacttgtgaccagatgtatcatgttggaactgcgatcagttccagtgttgccatagttccaacagaccagatctgtgctggatatgccgctggccagaaggactcctgtcagggagactctgggggaccccttgtttgtgatatacaaggagtttggtatcaagtcggaattgtgagttggggagacggatgtgctgttgcaaaccgacccggcgtttataccctggtgcccgctttccgttcatggctctcctcatacaacgcaaccacagataattcatacgcatcaagttatgcccacaagtcccactcacctgctctacacatacacacaattttcgttgggatatgtctgctcctgtacagctggattgtggtggagacaaaggactaaattaatttaattaaaatgatttttatgcaattttagtttagtttttctaattaataaacctaatgtgaaccaataaaaaaaaaaaaaaaaaaaaaaaaaa

SEQ ID NO: 577 - DNA, 2261 bp, Xenopus laevis
attgcgctcggacatcagtgaatcgactgatcaggagagatgattagtgtgtgtgcgctgttagtgctgggcctgaaggccagtgacgctgtgacagttgattactttgattatggagcgttgttctatcagacttacggcccctcaggggaatttctgatggactataacgggaatgagctgttacatgtggatttggagtcaaagtcagtggtttggacgctgcccgggctggacaaatgggaatcatttgatccacagagaggcctgcaaaatattaatgtagcgaaatataacgtagacgtttataaaaagagcccaaacagtacagcagccactagcattcctccattgatcagtctctacgccgcaaagcctgtagtactgggagaacccaacatcctaatctgctgtgtaaaaaatatttttcctccagtgatgaacacaacctggtttaaaaatggccaacaaatttccaaaggatttcgtgagactagctttctgcctgcacaggaccactccttccgtagacttcattatctggcatttttaccagatgaacatgatatttacacatgtgaagtggagcactggggcttggagaaacccacacggcgtgtttggcagcatgaagccccaacacccgtctcagaggcataccaaaatgtgatctgtgctttggggctggcagttggaatcattgggataattgctggtgtcatgctgatcattaaagggatgaagcagagtgctgcacaagggaggagccagcgctaatctggatgaatggggggattttttttttacagctttctattttcatcaacactgtataaattcttctgcacatatagctcttactctttaatgcagacaacgtagcttgaagctcaaagaaaagaatgttaagatgctcataagcctattttaataaatcaacatagtttattataatttaatttactatgtccccaccccttttaacttaattaaatgcaatgcaaaattggaaatccaataaactttaatacagaagtgtttttagtttatcttacacctgttcatttagccataatcatcccattcccatccattattgtacttaattctgattagggaagggtattgtgatagtcagcacattgacactcagttatctgactgcaacaggaagcatctggtgatttcaattaagctacaagagaaagtatctgttcttattctggcataaatatatctatactctacatgcctagaagcatttctctttaacatcagcagaatcgcaccaaccaatgtaaaaggtgtgcagatgacattaaactgaagggattatgcttagtagggactcaagttaaaagctgtattaaagtaagtttcaaattttaaaaagtcgttccctccttcacctctacagaaatgctctcagcacctgacaaaggattactaaagtacaggtggttcttatgcaaatcaaagagacagtttttgacttaaattacttaaaaatatcccatatcattgccttaatgacttatggtgaggatcaggtgtatctgttctcctttgtcttgctaccctgttggatatgtaacttatgtacacaaacagaacagaaactattcctatgccccatgaaatagcatttacatatatatttaatggggcatcacgtttgctgtagtctctgctacaatgcattaaaagatgaattctttgatttttaaattagatgtttaagattatccatctctgaaactgtttttgaaaattacatttaattacagccttgttattatttggaatgtctttaggtttatgtgtgatgtatcatataattctaaccacaatttgatttattggtgatgctatatgttataattgttagtactgaaaatcaatatcaaaaagaattctcagttacaaggaactccttgaagattcttactgattgttgaagttgtaacattcttggttttctctatgctttggtggctccagagcagcaaattgctcaaatacccagttccagtcatgtactttcttatcttgtctgctgttttctgtataacctaaatggatgccctgttgtttttcttgattgcctaaacagctattaaaagtgtgaccaagccaatatcattcattcataacttatctttatgtagaggtcatatggcggaggcaataaaagtcagtgaagaactatttgcaatgtgaaaaaaaaaaaaaaaaaaaaaaaaaaaaaaaaaaaaaaaaaa

SEQ ID NO: 578 - DNA, 4352 bp, Xenopus laevis
ggctctgcaaaaatgggggggaaaaataagaaaaatcgacacggcagctcaacagcagttcagggagcgactgctgcagctaacaggccaagagcagctgcagaacccagacccgggggagaggatgccgcaaagaaacagacccccagaaattctaatgtggcccctggcagcaaggagtcaaacaaacaaggtcccaaaacatacagtttcgcatcatcctctgattctggtgtttctgtaaatcatgacaaatccgttttaaaggtagtgattgaagcaaagctggaaaaaaggataatttctcttattaatgagcataaaaagcttaatagtaacaagggaactgtgtcaggaagattgacttctaagaagttacaggatctttatatggccctgcagaaacttagctttaaggcggagcacattgaggaagcaatgacaaacacagtcttgtatggaggagacttacatgctgcattggactggctgtgcctgaacctcccagatgatgcattgcctgagggtttcagtcagcagtttgtggaagaagaacagagagcccgagcaaagttccaggcacctcctcagaggcccagtgctgcaaatgagtcagcaacagaaaagggggaagagggagcttcattaaagggcaacccagagctgaccatgaaggaatggattttacgatatgctgagcaagggagtgatgatgatgatgatgatgatgatgtgaaggaggaagagaaggagacaacacttgagaaatttgatcctaatgagagatacctggaactgactgcaaaactcctggatgccagagctcaagcaactgccaccaagcaggataaagacaaacagggtcagaaggaggctcaggagagaataaggggatatcagcaagaaatgaaaagcctggaagatcacccactgtttaatcctgctgtaaaaattccagaggtgaagagtgaaagcaaacagccaaagccagccttgcctccttcagaagatgaacctctaaatttcaatttgtttgagaagaaggaaaatgccccagaggagaaagctaaaaagaagccgcctcttgatatccggaactttgactacacctctcgaagctggacaggtaaatcgccaaaacagtttctgattgattggtgccggaagcattattcgaaaagtccaaatccatcgttcgagaaggtgcccgtgggcaaatactggaagagcagggttaagattataaaatcgcatgatgatgttatgtgtgtgtgtcctacaattgtgacagaggacagtatgcaggcgcaacacctcgcagccaccttggctctctatgagctcaccaagggccagtcggtgcatcagttgctgcctcccacctacaggaatgtttggctggagtggagcgatgctgagaaacaggtgcaggagcagaacaaaacggagtctaacaaaccacgggatcagtttatcacaaagctgttaaacaagctgaaggtgcaacagaaccagctgaagtcctgtagccagacccaaatgatggaggaccctgaggactcctgggagaacttggcctgtgatgaagaacaacatgagacctgtcccagtccactgctgcctgatgacttggagcccataaggaatattttccggaaatcccgggactctatgaagtacaagaggctgctaaatgacagggagcagttgccagtgttcgcacgcggaaactttatcttggagaccctaaaaagacaccgggttattgtggtggctggagaaaccggcagcgggaaaagtacccaagtcccccaatttctgctggaggatttgctctttaacgggggcagcccaggaaagtgtaacattgtctgcactcagcctcggaggatctccgccatgagcctggccaccagagtctgtgaggagctgggatgtgattctggccctggagggaagaattccctgtgtgggtatcagattaggatggagtcacggacaggggaagccaccagactgctgtactgtacaacgggaatcctgctgcgcaagttacaagaagacagtatgttgaagaacatcagccacatcattgtggacgaagtacatgagagaacggtccaatcggatttcttgctgatcatattacgtgagattctgcacaagcgatcagacctgcacctcgtgctgatgagtgccaccgtggactgtgagaagttctctagctactttacccactgtccaatcatacggatatccggaaggacctttccagtagaggtttttcatctggaagatgtggtggaagcaacgggatttgtcctggaacaagattctgagtattgccagaaattcttagaggacgaggaagaaataactctcagtgtcactggcaaagggggaagcagcaagaagtaccaggagtttattcctgctcagtccggcactgggctggatttgggtgcacgctaccagcgctatagcagtcagacacgccacgccgttctctacatgaatccaaacaaaatcaacctggatctcatcttggagctacttgttttcttggacataagcccagagtacaggaatgtggaaggagctgtgctgatcttcttgcctggccttgctgatatacagcagctttatgacatactgtcgtctgacaagaggttccatgacaggagaaggtataaattaatagccctccattcaatcctttccagccaagaccaggctgaagcattcatactcccacctgctggaacaagaaagattgttttggctacaaatattgcagaaactggcattaccatcccagatgtggtgtttgtcattgacgcaggaagaactaaggaaaacaggtatcatgagagcagtcagatgagctctttggtggagacgtttataagtaaagccagtgccctgcagcgccaagggagagccgggagagtcagaaacgggtactgcttccgactgtacacaagggagaggtttgagagcttcatggaatattctgttccagaaatcctgcgagtgccattggaagaactctgtctgcacataatgaagtgtgaccttggctcccctgaggatttcctatcaaaagcgttagacccgcctcagcttcaagttatcagtaatgcaatgagcctgctgcggaagattggggcgtgtgaactgagccagcccaaactcacccccctgggccaacatctagctgccctgccagtcaatgtgaagattggcaagatgcttatcttcggtgctatttttggctgcctggatgcagtagcgactctggccgccaccatgacagagaaatctccatttgttacacctattggggaaaaagacagggcagacctggcaaagtcatccatggcagttgctaattctgatcatgtgactatattccgtgcatatctggggtggaaggcgatcagaccagaaggttatgctgctgaaatgagttactgtagaaagaattttcttaacagaaaggcacttctaactatagaggatgtgaaacaagagctaatccgacttgtgagagcagcaggatttgagtgccccagatccgtggaggccaatggcctttctagcgccatgaaagccctttctgccgaagagacttccctcctaaaggccattctgacagctggactgtatgacaatgtaggcaagatcctctttacaaagtccgttgacatcacagagaaactggcgtgcatagtggaaaccgcacaaggtaaagcccaggtccatccatcctcagtgaacagagacctgcagatctatgggtggcttctttaccaggagaaggttaaatattccaaggtgtttcttcgagaaaccacactcatttctcctttcccagtgcttctctttggtggtgatattgctgtgcagcaccgggagcgcctactgactgtggatgactggatccatttccaggctccggtaaaaatcgcagtcatattcaaagagctgcgtatcttaattgaatctgttttgaagcagaaacttgaaaacccgaaaatgtcactgaaagatgacatgattttgaatatcatcaaagaactaatcaaaacagaacgataagcctcacgggaattctaatgactgctgcttcgtggaacaagggaaaagcgagggggattccatttcaaatattgtacactttcgggctacacaaacatttcctttgtacacaagggcagcttttcagtgttgcatggtgcattgaagagattttctcgttatttttttcatgaatctatttcaatgacaatgtcagatttgcaataaaaacacagtgccaaagctgttttgcctttaaaaaaaaaaaaaaa

SEQ ID NO: 579 - DNA, 2183 bp, Xenopus laevis
cccacgcgtccgggtaagggaggcaatatggcgggtgggtgtgctggataaagcagcgagaagctgcttatctggggcgattcggaggtcgctcagtattatggattctatgttggcttccgctagtcgctcggaggatgaggactcgtccgcagggactaaaaggagtttgcctcaaggttccgggctcgtgcctaaaagaaggagctcgtcgaggtttattaagcggaagaagtttgatgatgagttggtagagagtagtcttgcaaaatcaactagtcgtacccgtggtccaagtgtaggggagcaagggcgctattctggcagtgaaccttcttccagtgaaaaaaagaagcaagtctgcaaagcaatttcgactccagctccaccatctcctgcaccaagtcccagtatcgctaaacgtatcaaaaaaagcaaacaaccactgcaggtaaccaaggatctgggaagatggaaacctgctgatgacctgctacttattaacacagttttgcagacaaatgatctgcatgctgtacaccttggggttaaattcagttgtcgatttaatctgaatgagatacaagaacggtggtatgcattgctgtatgaccctgtcatttctaaattagcatgtcaggctattcgacaactgcacccagaagtcattgcagccatacagagtagggttttgttcagtaaagctgaagaacagctattaagcacagtaagctcggcctctcagcctacactggacacattccaagacttgctgaacaagcatccagaagtattttatatgtcacgtactgctaaatcgcttcaagtccattggcaacttatgaagcaatactatttgctagaagaccaaacagttcagccacttcctaaaggggatcaagttttgaatttttctgatgcagaagacatgctagatgacagtaagctcagagaaaccagagatgaagttcttgaacatgagctgaccgttgctgatcgccgccagaaaagggagatccgccagttagagcaggaattaaataggtggcaagttttagtggacagcatcacaggaatgagttcccctgactttgacacacagacgttggctgtgctacgtggacgcatggtgcgctatctgatgagatctcgagagattactcttggaagagctacaaaggacaaccaaattgatgtggatctgtctctggagggcccggcttggaaaatttcaagaaaacaaggtgtcatcaaactaaaaaataatggagacttcttcatagccaatgagggtcggcgtgctatttatatcgatggaagacctgtgctgccagggagcaagtggaagctcagtcataactctgttgtagagatatccggtcttcgctttgtgttccttatcaatcaggacctgatctctctgatcaaagctgaagctgcaaaagtcatccagccttgaagaaagtaacttgttaatgaactaaagctgaactcttcctttgtccctctccgcttagagagatgctttgactttctttctgctatggggcaaataggatatttgtgtcagggtaaaaggaggacttttatacagtaatttttggatttgttctggacacacttgttgaatactgtttagtggtattgtacatactaatactttttttgtcttttatttggtaaattagcaatttataaaatttttattttttttaagttgcttgctttacagtgaaaaccagcaacattcgaattcgatctaacacatttaaaataaatgccaaaccgatacaagagatttgtgtatgaaacatgaatttatttgtgttaccagtgaccagaccaacacctttaaagtgcaatgcacagtgtgctttttattaataggatacacttttttccccagtcatctactttttaagctttttggtttcatacaatgtatcttaaagataataataatttgctgcttcctaggtagactgagacatgcttaggttttggtttagccatagggcaaagtcttgggctgtcccataggaatgaaggcaaggaagaaattgccttttgtttttaaagcactagctgtaaagttttttttttttctttggcaaataaaatgtttgtctttttgcagctaaaaaaaaaaaaaaaaaaaaaaaaaaaaaaaaaaaaaaaaaaaa

SEQ ID NO: 580 - DNA, 892 bp, Xenopus laevis
cagtactgagccgagcggcggtctgtcctgagatctctgagccagacattgagcggctggttgagaccgtgggataatgagaagctgttgagagtggtgactgtgttcccttcccccactggtcaccattgcgattatggcagacagcgaagagcaggaagactacaagatgcaggcatttgatgctgacatccagaatcttctaaaaacagcactaaaagaaccagggaatgtggacttagaaaaggctgcaaatgtgattgcagatcagtcactaagagataccaccttcagcagggaagcaggaaggatgtgctatactattatccaggcggagagcaagcagacagggcgcaccatgtttcgctccagcctcctgaaccggctgcaggtggagtataagaaccggaaggagacaagggctcgctctctgcaggagtgggtgtgctacgtcggcttcatgtgcaacgtcttcgactatcttagggtgaataacatgccgatgctggctctagttcatcctgtgtacgactgcctatttgatttggtacagcctgagagtctgaaaagggaagaggaggttgattgcttggtattacagttacatcgggtaggggagcagctggagaagatgaactgccagcgtatggatgatcttttctcgcagctgagagacagcttcctcctgcagggaggcctcagttcactgacccagctcctgctgctcgagatgattgagtatagggcggccggttggcgtatgactgacgctgcacagaactattattatagtgaagtgtcggactgattccatagacgttggattttatcctacatgtacattaaaagcacaagattttataaacccaaaaaaaaaaaaaaaaaaaaaaaa

SEQ ID NO: 581 - DNA, 1328 bp, Xenopus laevis
ccaggaactatgagccaattttgggattacaaccaggctatactggatgcaccacaggaattgttctacagattccaactgaaccctgttcatggggtccccattatgaagcccattgcagataactgggagaggatagaggcatttcaggcaaggccagatgacctcctcgttgcaacctatcccaaagcaggtaccacctggatgcaggaaatagtggattccatcattaacgatggagacctgaaaaaagtgaaatgtgctcctatgcacgtccgattccctttcctggaaatctgcaaccctccacccgtcccttgtggagtagatatcttggaagggacgacatccccacgaaaaataaaaactcatcttccttatgaactcattccaagatccttctgggaacacgactgcaaggtgatctatgtcgcccgcaatgcaaaggactctgctgtctcttattaccactttgatctgatggaaaagactcagccacaccccggcacctgggaggagtatgtgggaaagttcttaaagggaaatgtgccctggggcggctggttcgatcatgttatcggctggtggaaagctagggccaaacaccaaatcttatacatgttctatgaggacatgaaagaggacccaaagcgtgagatccacaaggtgatgaggttcctggggaaggatttaacggaggaccttcttgagaagatctgtcagcacacctctttcaaggccatgaaggaaaaccccatggctaattacagcaccacgccagccagtgttttggaccagtccatctcaaaattcatgaggaaaggggaagtctctgactggaagaatcatttcactgttcagcagaatgagatgttggatgccgagtaccagaagagaatggaaggaacggacctcaaattccgtttcagtatctgagcgcgtcatagacccacaggagaaaggagatttgggcagaaactcttctaggagcacaaggagcccaatggaaaaatgaagaaaacttactacaataagggaaataaaggctttagatgtccctgttctgccaagtccaatgtatcggagcacaagtggcaccaacaacaaataacacagggatacactgcaatcatgtcaggactccgattgtggggaaccctatcaagagaggggtgagcagtgattgtttagtgaggggtagagaggagaggagaaggtttctgtactgtatggagaatcaggttatgggatttcactgggggtctgggatttatattatcaaataaaaacgactcaataaccaaaaaaaaaaaaaaaaaaaaaaaaaa

SEQ ID NO: 582 - DNA, 3216 bp, Xenopus laevis
cacggagtgggcatgaagcggacacagcgcggcgcgttgcaggggaaaccggggagaggaagctgaagagccaactatgggcacagagtgttcccctcgatcgctgctcctcatccttctcctactgctgcgcacaaatggcatcttcatgttaccagcacccaagaatgtacacattgactcctacaatctgcagcacaaattgctttgggatcccatcttattggaaaatgtgacctacacggtgcacttgatgtggggaaataaggatgactatattgtcctttgtgagaatcttattgagccagtgtgtgatttcacagaagagattgaatttaagtggcgtattgttgtaagagtacgagcgcaacgcggaccagcacattccaactggactgaaacatctgaattccaagcagcaagtcacaccaaactaggtcctgtaaattttctaacggtgtccagggaggaagaacccaactctctctatgtcagttttgagtctcctttaccaccaaacacagagtacagtatgaagtatttgctacaatactggagaaaaggttttgccgtgaagacagagctgtgggtgaccaatacattgcttaaactgaaagatctggaggcctcagctgagtactgcgtgaatgtaactgctgtcatgaagattcctcctgttattcccgatctgactggggagacaagccacgtagtttgtgcaaaaacaccaggagctccaggtgtcactgcagacaaagttatttttatttctgtgggactcattattctctgctgtatattcctgggattcagctatgctttctccaggcaccgcggacgtatcaaaacgtggctgtatcccccatacaatataccccccgacatagagcagtacttgcaagaacccccctggaatggacatctagaaaaaagcaaagaattgcattcggcagaagagcagtatgatattatttccattgtggaaagtgaatcctgacagattcttgtaatgaaggagaatagacaagagagagaggctgaaaaggattaggtgttccctccaaattcagtgtgattacactttaaaggagcctatggcattgctggaaacatttgaggttcaattttaagaaaaatgctctacaaatcttaaggtatccaacacattatgaactataattccctgcaaaaagcttgttggaaatgatacgttacaatagctggaggtagaacccacggatcatagaacttacaggctccttgggtcagaactaaaaaacacacaagcatttttctggtttaaatgtgtaattacaggtgggtgacattaaagtcaatggttggctgcactggtggttcatagtggtatacaggcccgggcctagggtggcacatttttcagggaggcatgctgcccagctgctctatggggacgcgctgctccccaatgctctggcggtagtgagggtgggcgctaagaccatgcggatcgtgtggcctagggacgcccgtccagcaaatccagcgctggtgatatagacactctcggctggcagagaaatgctcagccatgtgaagcacaacattttgatcatttcatttatgtgtagaggaaaaaaggttccgtgcacagattcccgtttattgcactgcactttaaaagcatagcaatagtgagcgactataaggggggccacataggacataactgttcagtgagttttgtagaggaagtgggaatccacgctcagccaattaactctttatagatgaatgcatcaatcctcttaagtagatgtaccgaacatccaaaactattagactttcagtgggaaagaggagagctgtacacgacaattatagcccgaaacatgtcgtgtacagcagcttaaataaatattaatcacaagcagttaatctgagtttgagtgctctcctcttttccactgttcagtgagtttgcaattgatattcagctcagattcaaaagcaacagatatgatatgacccatgtggccccccctcaagtcacagattggttactgcctggtaaccgatcagaggaaaccaagagagctgaaaagcaggaagtagtgttctggctattatgttagacatccagtcactccagcctttatacattacatttttgcctaactaactatattagaaacatttttttattttgcacagcctatttacccagttttgaatttttatactgaacaattcctttaaagaagaagagcggcagggacgtggatttgaatactatagagaagctgaccctgctgtccgggccctaccccctgcaaccaggtctggactgagaaccaaaataggccctggcatttcaggtacccagaggccccaacaggtcgcacagaggcccaaacagccccccacaagcccactaaatagtgagtgtctatagcatcttacagcagcccctctggcatttgccagaacccacaaattgccagtccgacctgcctgcaaccgtggggtctgctttctctatagttactccactgtctctaggacggctacatttgtgtttacagcaaatttcaccctggtggagaatcctcaggaatttcaattaacaattgttatcctagttgatctcagacggggttcataatcaactacaggtatgggacctgttatccagaatgctcgggaccagtcgcttttcggataatggatctttctgtaatttggatcttcataccttaaatctactagaaaatcatgtaaaccttaaataaacccatttggctggttttgctttcaataaggattaattgtatcttagttgggatctagtacaatacactgttttattgttacagagaaaacggaaatcatttttaaaaatttggattatttggataaaatgggaggttatctttctgtaatgtggatctttctggataacagatctgtactttgttgccttctaaagggcctagattcacagtgtgggctttttgacattaacgtgttgatatatttatgctggcgccatggattttaaggtatctggcaaattagcagttcctttatttctcaaaatgtttttattattgtactaaatggaggagtctcattctgaatcccccgtgtatctgtacatgtcattgtttgcaaacattctgccagtaaattccagttctgttaatgattgaaaaaaaaaaaaaaaaaaaaaaaaaa

SEQ ID NO: 583 - DNA, 2419 bp, Xenopus laevis
ctttcctccgctgcgtcttgggccgcaggcgcgtggaggattatggtatttatggtttttcctctaataccaggagaccaatggcggccagtactacccacaagaacggaggctgtcactgtgcaactgagaggtaatattaacaaatcaccgattgactgatatggcgataagaggccacaagggacttcagcaattgttaagcatggcaacatctgtgaattcttttttggggcccatgaaatcatacaagtttatatttgaccaaattactcatgaaagtatattgacttcttcttcattccgacttctggaaaatctggatctcactagtgccattggacaacttcttaatgaaacaattcaggcgcatcacaaaagctataaaactggaacaacaactctgtttttcatggttggggcatggagcagtgctgtacaggaatgtttacacttagggatccctgtatcgttaatcgtttctgttatgctggatggattaaattcatgcattgggcatgttcactctttacaggtatctctagtatcccaggtaactagtgattgcacaaatatcaagaccaatggcataaatcattcaaattattcagcctcaggggatcagggcaattgttcttcagaactagaaaacaatccactgcctcgtgtttctaatatgaggacagcttctgaatttcctgtagcgttccataaaaaacctttaccgctatgtactggtacaaatctttataaaactcagaggagaaggctttttcacagcaggcacttagctgaagatttaagtttttttcaggatgtgcctgaaaggcctcaaacaactacattaaataatgaaaccctggatggcttggcaaaaggcttggctcatggctaccagccagttatgaaccttgtgaaaaatgcagtgtgtctacattgtgcagaaattaaagaaaactccttagacaaaagcagtttcaacatctctagacttgagacgtgtagtttaccaggtttgtccgaagagcacacaactgtatcttttggatacactactttagtcccaactgagagtgctgctgtcattacacatctcaatggaaaaccacttcgaatccttcttgtagatggtgaattaactgaaagccatcgtcatctgggctttgacaatccagacaatgttaaaatggtgtttgaacatgcgggcaatgaaaaacataacttagaggattcttggatcagtagggcatatgaaaaaattattcaagctaatataaacttgattttagtaagaggcgatgtgtgcccttttcttctaaaacagtgcattcatagaaatatccttattgttactcaagtaaagcaaaatattctgcaagcgttcagtgaatgcactggcgcagaacctgtgacgtacctaactcaaattaactgctgctctgtgggcaatgaggcctttgtcacgttgtgcactagagcaaactccataatagaagtaagtcaaaaaatagttatttctatcacagcaaagaaactgaacctgataacagctacacttagtagcagaataccatctacaatgcagtccatagaagatcagtttttgacgtgtgcatacaggttacatcatgctcttcaggaaggaaacgtgttttatggaggtggggccattgaacttttgtgtattcaccaccttcagaagctcgtacaagaatcttcatcatctttctatgcatatgacaatgcccagttccattgcctctcgtcatggatgactgaaagtgctactttttacagagcagctattatcggctgtcttgccaaaggctggtacaagtatatttctgttcttctttgcaacatgggtggattcctttcagaattggatgctgtgacgtttatagagaatgaacttcaaaatataagccaccactcttcacctattgactatgttcgtgatcagtattccaaaaaagatttatttaatgatgaaatgggtatttccatctcacaccacagtttaccagtgtatgataatgttacaccaaagctggaagcatggcgcagagctttgcatttagttcttacagtgcttcagacggatgctgaagtcatcactaactccgctacacaaaaccagatacttatgtcagagacttcaaatggagaatatctatttctataggcacataagactttgctggactagtatgaatccataattttaaggacagaattacttgattttctatgttttagaatatattttgaattataagcatagtatgccttctatgtttcagagtatattttttgttgagagcagacactggtgcttgtcaggggctccattaaagattttgcatcttctagaatagatactacatacttaaaaaaaaaaaaaaaaaaaaaaaaaaaa

SEQ ID NO: 584 - DNA, 2076 bp, Xenopus laevis
ccttttcctgagcgccgccccataatttccgttcccagagtgcctcgcgttgaatcatggaccataatgataatgatctacaaggcactaacagtatggggtccatgagtggcttggatgtccgtcggcgaatacctataaagctaatttcaaagcaaccaaacaaaagtaaaccgtctcctcggccccaaagaaacatgaaccgaatcccaacaaagcctcagccaggtgaagaaggttttaattataatgaagaggagaggtatgaaaataaaggaggtgacatgtttaatagtcagaggagatttcctgctcacctattttgggactttaagcttaatctcattggagaaaaagaagacacccctgttcatttttgtgacaaatgtggcctgcctattaaaatctatggacgcatgattccttgtaagcatgttttctgctatgactgtgctttaatgcatgagaaaaaggcagataaactgtgcccaggaacacttgttgaagaaagtactgacaccttcaaacgtatgagctgtaatgatccagttcaacgcattgagcagtgtgcacgtggctctctcttcatgtgtagcattgtgcaaggttgcaagagaacatatttatctcaaagagatctgcaggcacacattaatcaccgtcacatgagagctaccaagccaactgcccgacctcagcctgagccaatccatcctactttgggcccacccccagcagaaatcccagatcgctttataatgcccccagataagcaccatctgaatcatatgccaccaaaacaacatatattgatgccaccaccccccatgcagcatgttcctcatgagcatttcagtcaacaacatgatgatattcggccctctcaggcagaaatttccttagccccccctccaccccgctctgttaatcaggatgctttcagaatatctactagacagcatagcaacttaatcacagtccctattcaggatgattccaattctggggtcagagaaactcctcaggcacctggtccttctctacatcatccagagtatccaggccaaccagtggtggctcatccccaccatatcatgcctccacagcaacattatgcgccacctcctccaccaccacctccaatcagtcatccaatgcaacaccctcctcaggcagctgggacacctcacatggtttacagccaaggtcctccaccaccaatgacaactgttccaccaccaatcacacccccacctggacatataattgctcaaatcccaccatacatgaatcatcctcctccaggacctccaccaccacaacatggtggtccaccagttaatgctcctcctccccatcattataatcctagctctttgccacagttcaatgaagatcaaggaactctaagccctccctttacacaacctgggggaatgagccctgggatgtggcccgctccaagagggcctctgccacctccccgaatgcaagggcctccttctcaagcccctattccaggacctcatcatccagatcaggccagatacaggccatattaccaatgatgtacatattctgaacttgctagatgtattttgttgcttcagatgcaggttaatagtaatgtgtatactgtttctttcagttgttgctttcccttctttggaagtgtgaaaataaaacacaatttcagctggactgcatattctgaaaactttgactttaataatcatacagtcagatttgtgttttctagattttgacaaaccatgagtttgccattaaaactttaatcttctgaattttatagcagtaccaagtgtctcttcctaacgatatgttacacccaatggtaagatcagggtagttttgttttgaaatgtaatataaatttaagtatagatgtacagttgtagtttccctgagttgtaaaatataacaaagtaacaactgctgtatcacattctggaattttaatagccagtaaaatactcaatttctaagattaaatggtttgccttattaataaaaatatcttcataaaaaaaaaaaaaaaaaaaaaaaaaaaaaaaa

SEQ ID NO: 585 - DNA, 2388 bp, Xenopus laevis
gtgactgcaaatatgggacacacaggaacaggttttatgttccaagttgttgtgtggagcattctgacttctagttcattgggagcagagccaatatccacagccctggagacatctccatgtccagcaccctgtgtgtgcacgtatgactacagtgaggagtacagtgtgttctgcagctcccgaaatctcactcatgttcctgagctgctgctgcttcccagcgctcgatctctatggcttgatggaaacaaccttacaagtgtgcaggcaggagccttcaataatgtcgcttatctggactttctcaatctgcagagcagccaggtagctaacctagagcaaaacgccctacatggcctcaaggctctggctcatctccacttggaaaggaacatgttgaaattcttatctccaaacactttcactcatactcagaatttggtctcccttagccttaacaacaacctcttttccaaagttgaagatggactgttttccggtctctcaaacctgtggtaccttaatttaggttggaacttgttagtggtgttacctgaaatggtgttccaagacttgaaaaacctgagggaactcatcctggctgggaatcacctggtgtatctgcagcctttgctcttcgttagtcttggggagctaaaagaactagatttgagtgggaacactctgagaggaattaaggctaatgtgttcacaaggcagcagaagacccaaaaactctatcttaatcacaaccacatttcaactgttgctcctaaagctttctcaggcatgaagaccctacgttggctggacctgtctcacaaccgactgtcagctctgtacgaggacaccttttttggtctatcaggcctcaatgttctacgtctgaccaataattctctcacaagcctaaggcctagaattttcaaggatctccagtttttagttgagctcaacctcggccaaaataaaatcaagattctcctggaacggacttttgaaggtcttggtcaactcgagttgctgtctttgaatcacaataacgttcaggaaatccgccaaggctcattcattgggctgcttaatgttgcagtaatcaacctgtctggaaactgcctcaagtcacttccagaacgttgttttaacggcctggggaagcttcacagtttgcacatggagaacagttgcctcagccaggtcaagtcgcagatgtttgctggcctctcaactatccgaaggctcttcctacaacacaatgaaattgtagctattgatgatcatagtttcactgacctccacgatctcctagaattggaccttcgatttaataaattgacccatctctcaagcagatcatttataggattaaagaacctctcgtatcttcttctttcttccaaccagattctaaccatttctccagaggtcttcatgtcggtccagcagctccaatggctggatctctcagacaaccagttaaaaaccctgactgaagaaacctttgtgcctttgtcctccttgcggtatctcagtctcaagaacaactatttgaaatctctctcggtggactccctgattgctctctccactatgcagcagctgtggcttaatggaaaccagtgggactgtagctgctctctgaaaggactacgagaccttgccctgaggaacagcaccattgtccctcacctggtccagtcggtatcagaaggggatgacactgccagtccagtctataataacatcacatgtgccagtcctccagaagccatgggacaagacatacgagatctgagtgaaggccactttgcccactgcttgtaactcgtcatattaacaagtaattcccacaacttctgtccagatccaacttctgtgatagtgccaatatgttgttagagtgaggtccagccttgtagaataggtaggtagagctttgctagcttctccagacatgccccacaaatcagtaccctacattacataggaggggccactggggtaaatgataatatgttactagcacttcatgcagtagaacctacaggtaattgggatattattttctaattgcccacatatgtacattttttgccagtctagatactttttcacacaatgcccaaaggctcatgtagcctaacaatggggggctaaagtcatgttggaattattgtaagtctggcccataattcccagtagctctggcaggtttatgagcaggacaagacatttccatggaacatccgagccacataagataagcctgtctcacacctctatgtatcaatgaaacgaagccatttactgctgtgtaaaacttgcaccatttgtatgaaaataaacgtttataagatgaaaaaaaaaaaaaaaaaaaaaaaaaaa

SEQ ID NO: 586 - DNA, 4872 bp, Xenopus laevis
gcgatgcactgagaggatccggggcaggaatatggggccgattgtgctctctgcgctcatcctgctggtcgtggtgagcgccagagcggctatcatatttactaaagagccgtcctcccaggatgcattgcatggaaggagtgccatactgcgctgtgaagtcgaagagcctgtggcattgcagtttgagtggctgcagaatggggtgccagtacgtgacacggagaggcgataccaagatggcgggagtctgacattcacggctgtggacagaaaacaagatggcgggaccttccagtgcgttgtccgtaacccgtccacaggggaagaggggaggagcaacatcgcttccttcaacatcaagtggatagagagcggccgtgtcacgctgcaggatccggctagtgccagcgacatccagagctcctctcgggtcacattgagatgccacatagatggacacccacgtccaatctgtcactggttccgagatgggaccccattagcggatgatgggcaggccacctcgttgagtaacaaggagcgcacactcactctgcacagcgcaggagcagatgatagcggggagtattactgctgcgcccacaatgcagctgggtctgtctgcagcaatcgcaacttcaccctgagtattatagacgagagcttcccacaggccgtggtgattccagaggatcaggttgtgaataagaacgaggacgccatgtttcactgtcagttcagtgccacgccaccccctagccaggaatggttctttgaagatcaggttcctcttagcaacaagagtcgcatcactgtgttccagaatggttccctgctcatcagctcggtgaggccacgtagcagtggggtctatagctgcgtgggcacagggtatagcggcaagaaagctgttctcaaggcctctctgcatctggcagatatagatgaaatgcggcccctccccccacgagttttaacagcagacctggttcagcgcattgcctgcgatcgtccacaaggaatacccccacctagcgtctggtgggagagagatggaaagcgagtcgctgctgagggcagagtttatcaggatggcatggagttggtattcaagcccattattgaggaggattccggccaatacatatgtcatgctgccaacaaggctggtgaacgcagacaagaactgcaaatcactgttgcgacggttccagagtggctggagagaccgacagacagtttgatggaggagggcaaacccggatttctgcattgtctaagcaaagcgtctcttaaacccaacataacctggtaccgtaacagcaaccccatcagcaaggattctcgctttgaggtatttcctaatgggacgctaaagatcttgcaggtagaggtgtatgatggaaccgtgtacagatgtgtgagcagtacccctgccggctctattcatgcccaggcccgggtgcaagtgcaagaaaatctgaagttcactccaatcccccgcccacaacagtgcatggagctggataaggcgataacagtgcattgttctgccacaggacgtgagaagcccactatacagtggattaaaggtgatggaagtgacctccctgcacacgtggagtctaatgcaggcctccttcacttccagcctgtgacccggagggatgctgggaattacacatgtattgcttctaacagccagcaggggaagatacaagcagccgtgcacctgactgtagcagtcctgatcagcttcaagatagaaccagagaacacgactgtgtatcagggccacacagcggtactgcactgccaagcaggaggcgaccctaccccacacatccagtggcaaagtagagacgtcatggtggatatccagcattacccacgaatacagattatgccaaatggctcactagtcatttaccatgtgaccaatgaggatgctggcaaatacgcttgcattgctggaaatgcctgtgacatcaagcaccgagacacgtttctatatgttgtggacaagccaccagggggagccagtgagccagattccccatacaaactgatccagacaattgttctctctgttgttgctgctgtcacttacatgatcatagttttggggctcatgttgtactgcaagaagcgcagaaagtctcggagacgtgacaagcatgagggagatgagccagaaatggagtgcctgaatggtgttacattgctgcagaatggccagaccacggctgaaatccctgaagagattccactcaccacactgagcaacaagagacacagctctggcgacaagatcactttccctcgtgccagcctacacccaatcacaaccctcggtcggggtgaatttggggaggtgttcctggctaaggctcccagtgcggattcagctgcaggggagttggtggttctggtgaaggcacttcagacccggaatgaacagcttcagatggatttcaggagggaattagacatgttctccaaactgaaccacactaatgtggtgcgcctgcttgggcagtgccgggaggcagaaccacactacattgtcctggaatatgttgacctgggggatctgaaacagtttctgcggatttccaggagccaagatgagaagccgaagcccttaagctccaagcacaaggtatctctctgttctcaggtggcgctggggatggagcacctgtctaacagtcgctttgtacacaaggaccttgcagcccggaactgcctcgtcagtgcccagcggttggtgaaggtttctgccctgggcttgagcaaggatgtgtacagcagcgagtaccacccccttcgacaggccaaggtgcccctccgctggatgcctcccgaggcagttcaggatgatgacttctccaccaaatcagacgtctggtcctttggggtgctaatgtgggaggtctttaccctgggggagctgccttatacctccctgcctgatgaggaggtgcttgctggtttacagaatggctccctgaagcttccagccccagagggatgttcctctagggtctacagactcatgcagcgctgctgggcccccagccccaaggaccgaccttcctttagtgaaatagtcaacacactgggggatttatcttccagcaaaaagactcaagggtgagccttgggatctctctgataccgaataagcacagcgtttgcctcaggagatgttaacacaataatgacagatggacatttggccacacaatccctatatgctgagatataaatggacataatcccggcagcaaatcagaggcttataatcaggtgggttgatatgaacttctggcgactctacttcattccttccaattgtggaacacactaaaagcaccatgaccgcatgtttgccctctcacccccttttacgtctgtacgtacatagagaagaagcaggtcattaacactaattgtatgtttcacccccatatttatatagtctctatcatgttactttgtcggtacaagggagtacagctgctttatgagaaatcatttatagctgagactttgagctggaaggctatgggtcagtggaggaccttgatcctggcagtaaatggtttcatggaggaccttgatccctggaggcagatgggtccatggggggcctttatccatggcctttatccatggcaagagatgagtccatgagagacattttttattgaaagaaggtgggcaaagtggcccatgtagagataactgtgcaacctggaactgtaaaatctactagtagatgctacatttccaggcatttaaaatgttaaatccattcttgccctgtagaggacaaaattcaagagatttagcactttctttttcaccactatttctgtttgctccaagagtagagagagaatttctcttctcctcccaggcactctgtccttctgtctctctcctcccaggccctctgactctcgcctcccgggccttctgactctctcttctcaagccctctgtctttctcctcccgggccctctgtcattctcctacggggcactctgtgtctttcccctctgcctctcctctctggccctatgtctcttctcctcccgggacctctgtctcctcccgggccctctgtctttctcctacggggcactctgtgtctctctcctctcaagcctcctctctgtctctctcctctctgtccctctgtctctctccccccgggtctctcttggtaactctcactctttttccaggcctggagtagagatgtaatgtctgttcttcttccgttccctctgtccttctgtttctactgaggccctctgtccttttgtcccccactcccagggttgtactccaccatgttgctgtcacattttgttaccattcttatttgtattgttgatgttgcctaaggctgctgtttgttatgggcaagtacactatgggggatcgctgccttttttgactgacgtcacagcaatgaaatggcccataattcctatggcacacggctacagattgattgatagctcagatactggtgtgagatttgctccccgttgccatagggatgagtggggcacaacttgctggaattcccccagtgatccagttttccttaatagagcaatgcagccggccccttgtataaccagtaaccctcacactaagtgcctgtatcatgaaggagttccgccagggcaggccttatattttgttttacgaactttttttattatttgtttttatatccaagtttagaatttatattactgggccatggtaccgcccacatttgacttttgttttatctattgcccataataaatgacttatgttttatataaaaaaaaaaaaaaaaa

SEQ ID NO: 587 - DNA, 1988 bp, Xenopus laevis
ctcacccagcgcagctccagttgtagtgtcatcggcgctgtacagtagctagcggggtcggcagtttgacctgcgctgtacattagtgacagatgtgacgtgtgcctacagccaacaaggacaatctgaagagccggcggtatacctggtgctgtacggttggaatagcagcacaggcagcagtgtacttagtgcaggacaaatggaatagcagcacaggcagcagcagtgtgtctagtgcaggacacttggagcatcagtacagtcatcagcatccactcactgagagggagatcacactcagcgctcacttggatttcagggctgatcctcctgccactttatttctaactggtctccctgccccactggggcatctcctgggcacccgctgagttggacaagaccagacccaggcagcctccctccctgtgagttcagatcttggatcatgtaccacgattatccagggaatttcgacagctcctcccgtggcagcagcagctccccagcccagcctgagggttatcccagcagcatcttatctacctccatccttcagaaattcaggacagatatgccaggatccagcagtgccttcatccccaccgtcaacgccatcactaccagccaagatctccagtggatggtgcaaccaactgtcatcacctccatgtccaacccctatgggcgcgcccatccttacagccactccgtgcccaacttggcttcagttactggtcactcggctctgcagagaccgggcgtaattaaaactattggcactacagcgggcaggaggagaagagatgagcagctctcacctgaggaagaggagaagcggagagtcaggagggagcggaataaactggcagcagcgaaatgtcgcaacaggcgacgtgaattaacagataaactccaggccgagacggagaagttggagcaggagaagtctggtttacagaaagagattgctgatcttcagaaggagaaggataaattggaattcatgcttgtcgcccactcaccagtgtgcaagattagcacagacgaccgaataatctcctcccagaatgtccggcccatgaaggttgtgatcaagcaagagcccgtcgaggaagacattccatctgccaaagtcatcgacaaaacccaacggtctgtaattaaacccatcaatattgctggagggttctttaacgaggagccgctcaacacccctgtcgtcatgtcatcaacgccccccaccacccccaccacctccaaccttgtcttcacatacccaagtgtcctggaccaagattcttcaacctcaccttcagaatcttgttctaaagcccaccgccggagcagtagcagtggcgaccagtcttctgattccttgaactcgcccaccctgctggctttgtaacgatcactgtagaactgtttttataagaactgaaaaaatggaaccagctagttgggccggatcttctctatgaagagaatgattgtattttcaaaacacctaaaagttcaacctttaactggatactgggctcgaatgtggcctgggagtttgcccggatgcagaacagatgatcaaacttgcattccttcatacagagacgaacctgttccactcaaatcctttcttattcattggtgtacccaagacatttcatccagtctttggggtagaggattgattttcacttgttctgaatttatgagggcactttaatggaatcatctgtttcttagaggggggttattcttcactggatgaaggtacaaaatttattatgtttttggaaccttgcatttccttccgtaaacaccatcccatcggctttttttgtatcaaactgggaatcattttggtggttgagaagatggcaaaacaaatggtggttcactgcatcggatatggagcttaaacattgtaaagacatcttctggagcggattccaccgaactcttagtttccaggattacattttttt

SEQ ID NO: 588 - DNA, 1452 bp, Xenopus laevis
ggagcgtgtaaaaattggtctctcttaggagacagctctggaagcgccgtgggttcatgtgctgctcctcctgctgtaacaagagtggggcagctcctatagactttatttttaataattatatatcttatatacatatatcttatgtcacactccctcagctccaccactggggcttggatggtctacaaacatctccctactggctgctctcaaggatttcccccccaggaacctggatctggaaggagggggtaatgagcccgtcctggggaagaagaaggagaagatgctttgcttggctgaagtgaaacattaaaatctgcagagaaaccgagagagagcaaaaaaagaggaggcagaacctttcctgcaggaacgtccctgggtcagaggcaatttgaatgtgtagctgactggagcctgtaggaaacacaaggggttaaaggcaagaagaagctttggaataacagcatggaagagaatgagcagaataacagggaagtggagccacagcaggagtcaggagaagagtccaacagggggatccttcatcaggctcctcctgggaaccaccagccccatcacaggataacgaacttcttcattgacaacattctacggccggagttcgggaggaggaaagaaggaataagccatcaggatgagctctatactgagagagacactggggctttgtctggggcagaaagcggccaccaccgagtcaatgtccccgagggcgcaggaggctcttccaaagtcatcactgttactggagagaagaaaagtgacctggccatggaagaaaccctgaaatccagaggacttaatggagaccattccctcagctcagactctgatagttcccaaaccagctccaaagccactcaacagcccatgttgtggccagcctgggtctactgcaccagatattcagacagaccttcatcaggtccgagatcccgcaaaccaaagaagaagagtgtcagtaaagaggacaagaggcccagaactgccttcactgctgatcagctccagaggctcaaggccgagttccaaacaaacaggtatttgactgagcagaggaggcaaagtttggctcaggaactcagtcttaacgaatctcaaatcaagatctggtttcagaataaaagagcaaagattaaaaaagcaacagggaacaaaaattcattggccctgcatttaatggctcaaggactttacaaccactcaaccacttcaaaggacggcaaatcagacagcgaatagtaacgtttcggtaacgcgaaggcctcgcaatgcaataatttaaggaagaataaagggccagtgtataaagattaaaccagcatttggctttggagtgtgtgtgttgggataaatccgcaatattctatgtaaatataatttacaggcaaaaacaaacaaaaaaaaaaaaaaacggaattc

SEQ ID NO: 589 - DNA, 3286 bp, Xenopus laevis
gaattccgcgaaattccgtgcccaggaaatcttacagaacaggttcccaatgccacgctacatcaatacagaacacggaggtagtcaggcaagatttcttctttccaaagtgaatccttctcagacacacaacaacctttacaattggggctcctgattcctggcgggacacacagcggagcagtgagaggaaacagcgggacagacagtcgctcagtgaccgcagagcttgagtcgacacagggatccagcgctcattctctcgttaccggcagcggacggaacaggccgacaccgagtatggcttccggatcagataccaaatccgatgacttgtctacagcaatcctgaagcaaaagagccggcccaatcggctaattgtggatgaatccatcaatgaggacaacagtgtggtgtcgctgtctcaggccaagatggatgagctgcagctctttagaggagacacggtcctgctgaaggggaagaagaggagagaagccgtttgcatcgttctctcagacgacacctgctctgatgaaaagatccgcatgaacagagttgtccgtaataacctgagggtgcggctcggagatgttatcagcattcagccctgcccagatgtgaagtatggcaagcgagtccatgttctgcccatagacgacacagtggagggcatcactgggaacctgtttgaggtgtatctcaagccttacttcctggaagcgtacagaccaatcaggaaaggtgacattttcctggtacgtggagggatgagagccgtggagttcaaagtggtggagacggatccttccccatactgcattgtggccccagataccgtaatccattgtgaaggggagccaattaagcgtgaggatgaggaggagtccttgaatgaagtgggctatgacgacattgggggctgcaggaaacaactggctcagatcaaagagatggtggaactgcctctcaggcacccggccctctttaaggctattggagtaaagcctcccaggggaattctgctgtatggacccccaggcactgggaaaaccctcattgctagagctgtggccaatgaaaccggagctttcttcttcctgattaatggaccggagatcatgagcaagctggcgggtgagtctgagagtaacctgcgcaaagcttttgaggaggctgagaagaatgcccctgccattatctttatagacgagctggatgccattgctcctaaaagagagaagacacacggagaagttgaacgccgtattgtgtcccagctactaacactcatggatgggctcaaacaacgcgcacacgtcattgtcatggcagccaccaaccgacccaacagcattgacccagcgcttaggagatttggtcgttttgacagggaggttgatatcggaatccccgactccaccggacgcctggaaatcctgcagattcacacgaagaacatgaagctttctgatgatgtggatctggaacaggttgctaatgaaacccacggacatgtaggtgctgatttggctgctctgtgctcagaagctgctctccaggccatcaggaagaagatggacctcatagacctggaagatgaaaccatagatgctgaagtgatgaattctttggctgtcactatggatgacttcaggtgggggcttagtcagagtaacccctcggctctacgagagaccgttgtggaggtgccgcaggtcacatgggaggatattgggggtttggaagacgtcaagagggagctccaggagctggttcagtatcctgtggagcatccagacaagttcctgaagttcggaatgactccatcaaagggtgtcctattctatggtccacctggttgtggtaagactttgctggctaaggccattgccaacgaatgccaggccaacttcatctccatcaaagggcccgaacttctcactatgtggtttggagagtctgaggccaacgtccgagagatatttgataaggctcggcaggctgctccctgtgtcctcttctttgatgaattggactccatcgctaaggctcgaggtgggaacattggagacgggggtggagctgctgacagagttattaaccagatccttactgagatggacggaatgtctataaagaagaatgtcttcatcatcggagccacaaacagaccagatatcattgaccccgccatcctgcgtcctggccgtctagatcagctcatttacatcccgctgcccgatgagaagtctcgtatggccatcctgaaggccaacctgaggaagtctccagttgccaaggatgtggacgtggacttcctggccaagatgaccaatggtttctccggagccgatctgactgagatttgccagcgagcctgtaaactggccatcagggaatctattgagaatgagatcagacgagagcgggacaggcagactaacccctccgctatggaagtggaagaagacgaccccgtaccggaaatccgcagagatcactttgaagaggccatgcgattggcccgccgctcagtcagcgataacgatatccgcaaatacgagatgttcgcacaaactcttcagcagagcagaggattcggcagcttcagatttcccgctgggggacaaagtggagcgggtccaagcccaggagccgggggaggcagtggcgggggccatttcactgaagaagacgacgatctctatggttaaagggtggtccgacccctcctcgttgtacagccaatcgattccttcgttaatggacactttgcttttcattccccagtccaactagaagcacccccacttctgttctatgattttgttacacgggtgtgagaagaggggagccaagtctctcaggattcttaaacttttacttttctcttctttccctccctgtttccgaagcggcccctgtgtttgcagagagtcgtccagggggggaatgaaagttcttcatccaccgagtgacttggggctccattacccccccgtgtggatcctgcagatatttctcttcttttcactcctccagttcagctgtttggccttcaactgttcatccaaagtgattctgttgggaaattaatgctgagattaactgttttgctgccagtgtgcctgtgaatgtttagctgggcactattgcagtaaaagggttaatacagaactagcagggccccgggtgttgcaggtttctccagctgtgaatgggtcgctcccttctccttctgggtataagaaaagcttaataaagacataaaatacggaattc

SEQ ID NO: 590 - DNA, 1436 bp, Xenopus laevis
  modified_base (1048)..(1048): a, c, t, g, unknown or other
  modified_base (1085)..(1085): a, c, t, g, unknown or other
  modified_base (1096)..(1096): a, c, t, g, unknown or other
  modified_base (1298)..(1298): a, c, t, g, unknown or other
  modified_base (1312)..(1312): a, c, t, g, unknown or other
gctgcactacgcccggaagcgcctttcattgctgagggttctgctgcgatcctattgcaagtgtgggcgcaacctgtagtacagaggtctcttcatccatttcacacacagcgcacaggtgacaatggaggaccggtggcaagagtgcatggattttctagctgtttcaatcgcaagaaaggcaggctcagtggtgtgtgcagcactaaaggaagatgtttcaataatggttaaaactagcctagccccagcagatctggtgacagccacagatcaaaaagtagaagaaatgattatctcatccattaaggaaaaatatccatcgcacagttttattggcgaggagtctgtagctgcaggagctggaagcacgctaacagataatccaacctggatcatagatcccatagatggcacaactaacttcgtacacaggtttccatttgtggctgtgtctattggatttgctgtgcacaagcaggttgaatttggagttgtctacagctgtgtagaagacaaaatgtacactgggagaaagggaaaaggttcattctgtaatggtcagaaattacaagtctccggacagaaagatattaccaaatccatgataataacggagctagggtcaaatcggaatccagagtttattaaaacggtgtcactgtctaacatggagagactgctgtgtattcccatccacgggattagagcagttggtacagcagcagtaaacatgtgtctcgtggctactggaggtgcagatgcttattatgagatgggtcttcattgctgggatatggcagctgcgtccgtcatcgttacagaagcaggcggaacaatcctggatgcaacaggaggcctgtttgacctgatgtcctgcaggatcatatccgctagcagccgagaaatagcggagcgaatcgctaaagagctacagattatacccctggaacgggatgatggcaaaagtaccaactgaaatgccagttttaactaaaggtgtttttgaatctatgaatattatggaattatgtacataagtttatgnattatgttctgtaaataggctttattttcatgcaacnattttttagcnaacatgtacattttttagtctgttatattcaattttaattagttgttctttgttttactaataagtttacctatttcatacttcctgccattcattctacagagttggaataaaagtaccatactgctgacaccatcgattctatagttccaggtctctctgtgatctacgctgcaccctactcgccgactgcaagccaatnagaatgaatgctgnaaggttcaagtctacaactaaattgtccgtagatgaaaagtatgagtaaggaaaatttacgtatgccttaaaacaataaatatagagatgtttttttttccttgccaaaaaaaaaaaaaaaaaa

SEQ ID NO: 591 - DNA, 3249 bp, Xenopus laevis
aatagtacaatcagtttggcgggaatatctaaccgcaatatggctactactacaccaagccggtcgacccggtcgtctatgcagtctcctgcccggggaacatctacccctctttcaccaactcgcatatctaggcttcaggagaaggaggagttgaggcatctcaatgaccgactggccgtctatatagaccgcgtgcgtgcgctggagctggaaaatgaccggctgatggtgaagatttccgaaaaagaggaagttaccacacgggaggttagtgggatcaagaacttgtatgaatcagagcttgctgatgctcggaaagttttggatgaaacagccagagaaagagcccggttgcaaatagagctgggaaaatttcgatcagatcttgacgagcttaacaaaaactacaaaaaaaaagatgctgacctgtctacggcacaggggcgtattaaagacttggaagctctctttcaccgaagtgaagcagaacttggaactgcactcggtgagaagcgaagtcttgaggcagaggtagcagatcttcgtgcccagctttccaagactgaagatgcccatcgtgttgctaaaaaacagctggaaaaggagaccttgatgagagttgactttgaaaatcgcatgcagagtttgcaggaggagatggacttcagaaagaatatttacgaggaggagtcccgtgaaacaaggaagcgtcatgaacgccgtatagtagaagtggacaggggccatcattatgactatgaatctaaattggcacaagcattggatgaactccgaaaacaacatgatgagcaagtgaagatgtacaaggaagaactagaacaaacctatcaagctaagcttgacaacatcaaacgttcttctgaccacaatgataaagctgccaacactgccctagaagaattaactgagcgacgcatgagaattgaaacacttggttaccaactgtcaggcctgcagaaacaggcaaatgctgcagaggaacgtatacgtgagttagaagagttgctaagcagtgaccgtgacaagtatcgtaaacttttggactccaaagaaagagagatggctgaaatgagggaccagatgcagcagcaactaaatgagtatcaagaattgcttgatgtcaaacttgcacttgatttggagataaatgcttaccgcaagctgctggaaggagaagaggaaaggttaaagctttccccaagcccagaatcacgagtcactgtctccagggcgacttccagtagctcttctgctacccgtacctctaggagcaaaagaaggcgtgttgaagaggaatatgaggaaggtggggcaagtacaggcttcggtgctggccattccctcggttcaagccgcatcactgctagtgagggttctagccgcactattactagtggccagagcagtactactcgatttcacttgtcccagcaggcttcggccacaggaagtatcagtattgaggagattgatttggaaggaaaatatgtccacctgaaaaataactctgataaggaccagtcccttggtaactggaggctgaagagaaaaattggagaggaggaggaaatagtttacaaattcacgcctaaatatgtacttaaagcagggcagtctgttaagatatacagtgctgatgctggggtggctcacagccccccttccattctagtgtggaagaaccagagttcctggggtacaggcagcaacattagaacatacttggttaacactgaagaggaggaagtagctgtgagaacagttacaaaatctgtcttaagaaatgtagaggaggaagaggacgaagacgcagactttggtgaggaagatctctttcaccagcagggtgatccaagaacaacatccagaggctgctctgtcatgtaaacaacattcataacatcctcctttttttttttacttactcccagagccactgatatctatttttatatgcaagttcaggttatgtcttctgtattttatgcctttcatttgttaagcgtgcagttaaaggaagtgaagagttacctaatgccataaataacttgcaaggcttttgtttttttcagttttcacttgtagtggttgcaaaaacgtactgctatgtttttaagtatttgtgttctaatatggcacaattttacctattcatagaagacaatggttttaatgattaccaaacatgtgcctgcatgaatcatgttgagcataaaatatgaggtggctgtttgtaacactaatattttgatttgacttttgtccagaattggataaaaattgtctggttagaagtccatactaaagatgatatacagatgtaactcgtaggaattaaaccatgttaattgtttaggaagttttagaatacaattgctattgcagaatgtgatcactatttcagtagtactgaagtctctttcacacctcaaattagcaactatctagatcttaaagttatccttctgcttctggtgtagtcttctatatgtgcgcagctggcaaaattcctaagactgactagattttacactttttttgttaatagaaacaaaggttgatttagcctgtccttgatttatgtttaggcacatgttgctataggtgtcccaacaactattgtcattgctcaggcagttcccactatgtgcataattacctcatatagcattgaacgttgtcaggagccactttagaatatgtagatttatttgtttcttagacttagccactacataataattgttggtacatttattgagcaggcagtatttccaattatgaatgggttgctactttaattgcaaggaagctgcaacgattgagaggaaatagaaaatatagcctttaatatgactatgaagattttcattcatccaggtcatagtatatctagtataggtcaatctaaaaacaactggacttgctgagtaatcaatgaagacgtttcactactcatccgagcagtttcttcagttgattttaagtaggggatatatttcccctgtagtccactgccattcttttttttttttcaactagaataacaatttgtgttttttttcctagttgcaattgaaaccaatacttttatatagcagactaatggtttcaagtacattttcattttttttttgttttttttttatttcaaatatgtgggtaatgtattttttaataacagctcacatctgcacatgaaagaacagagggatgaagggaagc

SEQ ID NO: 592 - DNA, 1562 bp, Xenopus laevis
cagcagttcttaccgagactcattgctgtcggtcggtgagaagccgcaaactgtgctttccattccgtattattattattatcatctgctgagaaaccgtctccgatcagtcatgcgtgagtgcatctctatccacgttggtcaggctggtgtgcagattggtaatgcctgctgggaactctattgtctggaacatggcatccaacctgatgggcagatgcccagtgacaagaccattggaggaggggacgactccttcaacacctttttcagtgaaactggagcaggaaagcatgtccccagggctgtctttgtagacttggaacccactgtcattgatgaggtgcgcactggcacatacaggcagttattccacccagagcagttaattacaggaaaggaagatgctgccaataattatgcccgtggccactacaccattggcaaggagatcattgacctggtgctggacaggatccgcaaactggctgaccagtgcacaggtctccagggtttcctggtgttccacagctttggtggtggcactggttctggattcacctctctgctgttagagcgtctctctgttgattatgggaagaaatccaagctagaatttgccatctatccagctcctcaggtctccacagctgtggtcgagccctacaactcaatcctcaccacccacaccaccctggaacactctgactgtgctttcatggtagataatgaggcaatttatgatatctgccgcagaaatctagatatagaacgcccaacatacaccaacctgaacaggctcattagtcagatagtttcttctatcacagcctctctacgatttgatggagccctaaatgtagatctcactgagttccagaccaacttggtgccctatccccgtattcatttccctcttgccacttatgcccctgtcatctctgcagagaaagcttatcatgagcagcttactgtagctgacattacaaatgcttgttttgagccagctaaccagatggtgaaatgtgaccctcgtcacggtaaatacatggcttgttgcctgttgtaccgtggtgatgtggtacctaaagatgtgaatgccgctattgccaccattaaaacaaagcgtagcatccagtttgtagactggtgccccactggtttcaaagttggtatcaactatcagcccccaactgtggttccagggggagacctggccaaggtgcagcgtgctgtgtgtatgctgagcaatactactgcaattgctgaggcctgggctcgtctggatcacaagtttgatctcatgtatgccaagcgtgcatttgtgcactggtatgttggtgagggtatggaagagggtgaattctctgaggcccgagaagacatggctgccctggagaaagattatgaagaggttggtgcagatagtgcagatgcagaagatgaaggcgaagagtattaactttattctattttccttgtgttgtgccttttttctgttgctgaattttcccttctgaaatcgaactgttttttaaaaataaagcaccattttaaatgtg

SEQ ID NO: 593 - DNA, 2666 bp, Xenopus laevis
gctctggaagcgcaggggattgatgtgctgctcctcctgctgtgcagatgttacagtgatatagactgtacatgtaatatctttctattattttatatctattatatgtcacacttgctgagctccaccactgggacttggatggggctacaaacatctccctgctggctactctgaaggatttctccccaggagtctggatctggaaggaggggggtaatgagcccgtcctggggaagaagaagaagaagatgctgtggttggcagaagtgaaacattaaaaatctgcagaggaaccaacagaggaaccaagagaacaagaagaagggtcaaagcctttctgctggaacgtctgtcggagccttggggttagaggcaatttgaatgtgtagctgactggagccagtaggaaacacaaggggttaaaggcaagaagaagctttggggaacagcatggaagagaatgagcagaataacagggaagtggaaccgcagcaggagtcaggagaagagtccaacagggggatccttcatcaggctcctcctgggaaccaccagccccatcacaggataactaacttcttcattgacaacatcctacggccggagttcgggaggagaaaagaaagaataaaccaccaggatgagctctttactgggagagacactggggctttgtctggggcagagagcggccaccaccgagtcaatgtccccgagggcgcaggaggctcttccaaagtcatcactgttactggagagaagaaaagtgatctagcgatggaagaaaccttaaaatccagaggacttaatggagaccattccctcagctcagactctgatagttcccaagccagctccaaagccactcaaaagcctatactgtggccagcctgggtctactgcaccagatattcagacagaccttcatcaggtccgagatcccgaaaaccaaagaagaagagtgtcagcaaagaggacaagaggcccagaactgccttcactgctgaacagcttcagaggctcaaggccgagttccaaactaacaggtatttgactgagcagaggaggcaaagtctggcccaggaactcggtctgaacgaatctcagatcaaaatctggtttcagaataaacgagcaaagattaaaaaatccacagggaacaaaaattccctggccctgcatttaatggcccaaggactttacaaccacgcgaccacttcaaaggacggcaaatcagacagcgaatagtaacgtttcggtagcgcaaaggcctcgcaatgcaataaaaaagcctgtgtataaagaatctaccagcatttggcttcggagtgtgtttattgggataaacccgcaatattctatgtaaatatcatttacagacaaacaaacaaaaggaaaaagtcgaaaatatggacacaactattttttctttgatttcattattattttattttgtttaatcctttccagtccttttttttcctgcctttagattttattttatactaaacgatgctcgtggatgtcggagagaaaaaaaaaatcaaaaaaagtcaacctttttttttttttttgctaaagtggaaagatgaaattgctgcatttcgcactactgtgaatttaattaaaaaaaaaaaaagctaatatttgttgtgtttttttttgtttttgttaatatttgaaactttttgttgtaaaataaatcaaagcaggggccatgtcctgtcgctgttgtaattaaaggtgtattttaattgatttaatttttttgtttttatatgcattttttttatagttgtgcagaatatgatttatttatatacactggcggggtgatttatagttttgcacttagtgttttttttttaaatgacatattggggcaacttttttctttaaaatgacatattgggcaactttttttttttttgctgacaaattgtattatttcccagaaattgaagatattgaagcctgacagctgcatatgtactaggaacaagcaaaccaaacatttgccaatcactgtcccaataaatggttaatttatccaatccactttcccctcctactatgacgtaatccccccttccccactctgctgcaccccccttccctgtttatggatccctcctttgtttccaacttccctgaattttaaaaaaagaccctgcaaaaataatacatgagcccaatgaataatggagaggtttataatgaatcaggtcaatggactacagctgatttgggccatttcttttgttacagttcattttttttttaaagatattaaagttttttttgttttttaaatcaatcaccgatttcatcgtaaagaatgtaatatttagccttggacagaagtaaaacttaaaaatcatgcaaaagaacctcttttctccaattctaggggaacttactacatttattctcttactgtatatgtaccatttgccttcttttaattgatttttttttttttaaattaaaaaacataaaaaggaaaaaaaaaaatctggcaagacaaagccagaaatctaatgatacaattagtgtaaatacaatgtttccaacactggcaatgtttgttttcatttgaatgtacagagatgcaaataataaatatttccccctttctgattttaaaaataaaccggaattcc

SEQ ID NO: 594 - DNA, 882 bp, Xenopus laevis
ggtgattgtggcttctgtataactgaccgcactgtcaagctgctgaaatgactggatcggagaagtgtttggctaaaggctgcccaacaccgggcccagtccctgaaggaacaattcgtgtgtacagcatgagattctgcccatatgcccagagtgcgaggcttgtcttggctgccaaagaaatcaagcatgaagtaataaatatcaatctgaagaaccagccagattggttctttgagaagagcccatctggcctggtaccatctctggagaccagcaatggccaggtgatctatgaatctccaattgtgtgtgattatctggatgaggtttatcctgggaagaagctgacccctgcagacccattccagaaagctcaacaaaagatgacggtggaacatttttccaaggtcacagctgtgctgtataagatattgtgtgccaaggcaaataatgaagacctatcaggtgcgaaagaagaactccaggagaagttgcttaaactcgatgagatcctggctaaacaaaacagccatttctttggtggaagtgaagtttctatggttgactacatgatttggccctggtttgaactgctcatcatttttgatgtgaaggattgtttgaataaaaccccactcattgataagtggtgtcaacagatgctgcaggatccagcggtcaaggcaacatatattgaaccagacgccatgttaagcttttttaagctgtacatccagggagatctggaggcttgtgattatggtctctaaccacctccctgccatgtattattgctgatttgcacttccactgtaatcagtattttagaacccaataaatgtgcctttcaacctaaaaaaaaaaaaaaaaaaaaaaaaa

SEQ ID NO: 595 - DNA, 2626 bp, Xenopus laevis
ggcagtattacagggacacagccaggaggagctcagggtgctaagaagtggagtctgctccttaagacaatggtgatgctacaatcacaggctgaggagccttggatcccggctaactgcctgcaatcaacatggcaactcccagtctggaggcacagcctgcaccctgtcttacacccagcaggcacatgagaggcatcgggttatggcgccgtcctgccgattcctgggaaaatgagcaaatggaaaagggaatcccattgaaggctcggctataggagcagcggaggggacagagcacagaattccttttttcctattgcaccggggaggccagaccatgtggaaagtcagctgtttggtaacgggattcctcctcatcctcacagtcaccagcacccccgctgcagagcatttgtaccggacagggcgcaggatctgctcggccgctgggcaccctggcaccgtgtcagttacccagtcctttctccagccggtacacagccctattatgactctgtgtgaggggcataggatctgcagtacatacagaacgacctacaaggtttcctaccgtcaagtctccaggagaacatccttccccctttactcttgctgccccggctggaggagaatcgaggcgcccactcacagttgcggccaagtgctgtgccgactgccatgtcagaatggagggacgtgcgtcggttctaataagtgtgaatgtccagctggatggagagggatccattgccagacggatgtggacgagtgcagcgacagaacccatcagtgttcccaactgtgcatcaactctgctggaagcttccaatgcgaatgtcttgaaggctaccggctgatggctgatggaaaggtgtgtgataacgtgcccaaacccaccgtgccccccacatcacccacatcagtacaagaatcaggggttccacattctgtcaaggaagaaatggcggaactgaggagcaagatagacgttctagagcagaagcttcacttgctgctgactccgtttcagggtttatccacctcatccccggacgatcgctccgaccccatcgctttactgacgcactcgctccagcagctcgataggatcgattcattgagtgagcagatctccttcttagaagaaaggctggagacgtgttcatgcaagactgagctttgattggcagccacacttccccccccccatggacaatcactgatgtactgcacttgggagatccgaggaatgcgggcgcttctctattggcattccgaggatagaatccataatccgactgctacacttccatgtcatagaatatgacaggtaaccgcattctgggttatacttccaccaatccaccagcgacttttataatatatatgttccaaccacccacagctgcatttggctcagtatcactgacattccccccaacacaggtacagagaattaacatggcggttattaagagtcaataatccttattatcatcatatcggccatatttaattcttcagtgataactgaggttaaactagggataaagtagaccgtcccttttctggatgagatgcatttgatcagacttagagtaggtgcaccaaggaaaaatgttagaatatccattaatcaatatatataaatatttctacaaaacggtgtacattgcttcacttactttcttgcacacaggctggtttgtctttcaagctgaaactcttctgccccgtccagagctatagtcatatggtcaccactgaaacatttggctgggctcagcccacaagcagcagggaaagatgcctagcgaccattgtttacattttacaaccattgggattaaagcaaataagcttcttaaactctattggtgcatttaaggggatgcagagttgtttagccccttcttacagtgcaaagcatatacaggtcggcactgaggctgctgagagtgctgggacattctgcatggcagctactagcgaggcacagagtatatgctgttgtcccataggatttgattgaactactacattgctatatatatatatataccgtatatactcgagtataagctacgtttttcagcccccaaaatatgctagaaaactctacctcggcttatactcgggtcaagcgcaaaaacggtcgccggcgcctaagaatagtcgccggcgtccaagaatattcgctggcgtccaagaatagttgccagcatccaaaaacgatacgccggcacctccaatgggagcagaaaccctcaattttttgattgaaacttaccagaagctgctgcatttctcaccctaggcttatactcgagtcaataagctttcccagtttttggaggtaaaattaggtaccttggcttatactcgggacggcttatactcgagtatatacggtatatatatatatatatatatatatatatatatatatatatatatatatatatatatatatatatatataaaactgtatatggtaccagcagccgccttattgcctatactttgtaatgtgtgttcttagcagattcatatatttttgtgtcaactcacaataaagcaacgtgaagaaaaaaaaaaaaaaaaaaaaaaaaaaaaaaaaaaa

SEQ ID NO: 596 - DNA, 1677 bp, Xenopus laevis
atttctggacccatccaataactgaccagcttcgggccatgaataagcctgcgcaccaccaaagtactgaacatgtgctttctggaggtgtagtggtcagtgccatcttcttcattctgtctgcacaaatcttggcatcctcttcaaggaaaggacagaagggcacgctggtgggttactcccctgagggcacaccgctgtataactttatgggagatgctttgcacagcacttccccctccatgcccaggttcctgaaagattcactgaagcaaatcctggaagagtacgactccagacagatcttctatttcctgtgtctgaatctggctttcacgtttgtggaactcttctatggcgtgtggaccaatagtctgggcttattatctgacggattccacatgttgtttgactgctctgcattagtgatgggccttattgctgcattaatgactcgctggaaagcaacccgaatcttttcatacgggtatggccgggtagaaattctgtctggatttatcaatggtctgtttctgatggttatagcatttttcgtgtttattgaggcggtggccaggatatttgaccctccagatatcaatacagacatgcttactcctgtctcagttggaggactgatcgtaaaccttgtcggtatctgtgcttttagccatgcccattcccatggggcttctcgaggagggtgtccttctcatgatcatggccattctcaccatggacacagtcatgggcacaaccactcacatagtgaccatggacatgcccataaccatggacatacccacaatcatggacactctcatgggtctgctggagttgggatgaatgcaaatatgagaggtgtattcttacatgtattggcagatacgcttggaagcgttggagtcattgtatccaccatcctgattcgacagttcggctggctcattgcagaccccttatgctcactattcatttctgtattaatatttgccagtgttctgcctttgcttaacgatgcctgccaggtgattcttctgaggataccacaagaaactgaaaaaggagtaaacattgcccttgaaaagatttctaacattgatggtctaatctcctaccgggatccacatttctggcgccattctgcctctcttgttgcagggactatacatgttcaggtgatgtcggatgttgtagagcagaggatcatccagcaggtaacgtccattctaaaggatgccggagtcaataacctcactgtacaagtggagaaagaagcttacttccagcatatgtctggccttagtaccgcattccaagatgtccttgtcatgaccaaacagatggacactatcacatactacaaggatgggacttatatcatgtgaccgaaatcatccaacagtattcatccgccttttgtccagggaatataaacacacagacttgtacataattgtacagatatcagactttctatagatttggattttataagtcacagttattctgtctttttaatatatatatatatgtatgtattctggtaaggacggctctttattttgaattactgggattgagagacgtgggcttcaatactgttttgtctttgtataataaatcttgtgtggccactcctaaaaaaaaaaaaaaaaaaaaaaaaaaaaaaaaaaa

SEQ ID NO: 597 - DNA, 1061 bp, Xenopus laevis
tttagtcattgtttctctttggttataacatattttaatctttttatagatggctgtagatgtatttcataacaaggaattctctgatgcttatcaagctgggatgattgtcgattctccaaaaattaagaatttgataatgtcatatttggaagaaaagaaagggaagccatttgagctggcagttgatgctggctgtgggacagggaggtccactcggactttggctccatatttccagaaggtggttggaatagatgtaagtgagtcccagttaagtgtggccagaaaatgtacttcacatgagaacatctcttaccagatttccccagctgaggagctgcctctggaagatgcatcagtggatctgattaatgcaggccttgctgctcattggttcaatcctgagaaatttggacaggaagcagctcgggtgcttaaacatggaggctgtttggccttatattgtttttcattggtatttgagattgagtataaggacaagtcagaggaactaactgctgcctttaatgaggctttgttaattctgcttgaatttcataagaaagtcgtctgtgaagtaaaggctatgtatcaggaattattcagtgccataccatttaaagataagcagaggatcagcggcatctgtgaagtatttcccttaacagtccctgaaataatgagtttccttcaggcaatttgttcgtacaaggagttcctagagcaagacaaagataaggccacagcttttctacaagatttagagaaaaggtttttagatatattgggtgaatctgcttctgatgctctaggatttcatgtatattatttctgtcttcttgcatccaaatcttgaattgccttcaactgtcaaacctgcacccttagaagactgagccattttttagtaattatattataaaatgtgaattctgttctctgtgtttaaataaacatacaaatctctgacattattaaagcaacataccagaaaaaaaaaaaaaaaaaaaaaaaaaaaaaaaaaaaaaaaaaaaaaaaaaaaaaaaaaaaaaaaaaaa

SEQ ID NO: 598 - DNA, 2256 bp, Xenopus laevis
atttatttctctttcccactcatgcccccggctcttccttacctcagctttgcttctgatatcctcttgtaaccagcatcccagtttcagtacaaaagtggaccccacaccgagggttactgctcacagggtgggctctgacaggagcatgtttggtgtatactgcatggaatatccgtatccagttgtgcagggtaaccaggagccgacagctactcctgacgcaatggttcagccctttgcagccatcccttttcctccaccaccacagaatggactatccacagactatggaagccagcacacacaggactatgctactcaatccaccgagcatgggattcccttgtatggaggagggcagagccatgcagagcacagcgccccagctaccagcactgccaatgcatccagcacgacagatggatcacagacagaaggacagcaaccacagacacaaaacagtgaaagtagcgaaagcaaagccaccccaaagcggcttcatgtttcgaacatccctttccgattccgggacccagacctgcgccaaatgtttggacaatttggcaaaattcttgacgtggaaatcatatttaacgagcgaggctccaagggttttggttttgtaacttttgaaactagcgcggatgctgaccaggcccgggagaaattgcacagcacggtggttgaggggcgaaaaatcgaggtgaacaatgccacagctcgtgtgatgaccaataagaaaagtgtgaccccttatggcaacggctggaaactcagtccggttgtaggagctgtttatggaccggaactttatgcagctgcacccgggctccaagctgacgtctctctggccactgaggctggtgttcccctgcccggaccacggggggttaacacgtacattccgttgatcattcctggatttccttaccctacagcagcagccgcagctaccacagcagctgcttttaggggggcacacttgaggggccgcgggaggacggtgtatggtgctgtgcgggcagtacctcctactgctatccccacatatcctggactagtcttacaggaaccaatcttaaaccctaaactacctcagggtggatatgcagcatacagatatgctcagccagccacagccgcaacagctgccaccgccgctgcagctgccgcagcagcctacagcgatgggtatgggcgagtatacacaactgacccatatcacgccctggcccctgctgccagttacggagtgggagctatggcgagtttatacagaggcggttacagccgatttgctccgtactgaagtgacgtaagcctattgtcccctattaaacctggacaaaactgcccttctttctccttctgacccctttccccttcctccactatcaacgttcgcgaggcccggcttttgcaatactttaaacgagaaactcctccaggaattttctagcagcgccacatggaaggacacagctgaaaaacattcaaacacacaaaaaaggacattttttatacctcagcctactcttcagatctgtatttttatttctgctttttggggttattttttttttgttgttgttgttttttagggggtgtgttcattttgttccaaagattgtgtttattttttattgtggtaaaagtgcgtgtatatatattatttacctacgtatgtgctgtgagctttttttaatattatttctacacttggaggggaggtttgcagaaatcaggaggacagaagatgccgataggacggggaggaagagagagattagaataagagaattgttattattggctcctggggaaccaatcctcttgcagtgagagtgttataggcagattgaatattgtttgctgggcgtttcatacaaacagaacggaaatgggacgaaaactcaatcaagaagaatagtgaattgggagaggcctacatgtgaccagcttgaactggcattattttgtacaccattgaagttgcactgtcatttgaatgctttgtgactgtctgacttggatacaaattactaaccttctcttcagctgcttcaatgcggataaatgaagtggtggaagaatgagaaaatggaaaaccaaaatgacttcccagtttggattatgacgcaattcttctgtgggcctagagagctattggcagttatacgtgtgatggggcaatcacagtggttggtgcagtataaatatgtttgtataaaaaaaaaaaaaaaaaaaaaaaaa

SEQ ID NO: 599 - DNA, 1549 bp, Xenopus laevis
cgttgcttgggaaagttgagtgtcaacatctgagccggcgttattgtgtttattttgtgagtcacagacgttgattgatgacacgctggcacagtggcactggcgcgcatgctctgtagactgtggcgcatctgtgcgttagatgccattacaaagactgggcagtagagagaacctgtgaattggagtattcgcggctcacgctgaagaggcacagaagacctgctgctgctgactaagggtaatgatgagtacccaaaactcagaaagcagcagaaagaggaagagtgcaaaaccgcaaaaatctgatcaagtcaaaagaaggcttcccttaaatgaaattgaggttatggaatcctttcataaggacgagtcacagtctggtgaacagaacacagcaaaaagaaatagaggaaggcctaaggggcacaaaaacaaatacccatcttggtcttctctgcagatctcttctgccagtgatggaaaatggcagagtaacattcctacctcatcacaatgtccaaaagaactggataatgaatatcctaaaggagaaaaagagagcacaacaaaggcactgtgcagttctcctgtgaaggatgaattacagtgtggtgaacagaacacagcaaaaggaaagagaggaagacctaaagggagcaaaaacaaatacccatcttggtttgctctgcagaatcgaacacctggagctccaaaaatgggacgagggagacccagaaaaccagtcgagactaatggtactgtggttcccaaaaggccaagagggaggcctaaaggaagtttgaataaagtcccttctgcaaaaaagcttgctgtcagcatgggaagctcgtgtgtacagaagagggggcgtccaaggaagcatttactgcatcttccaactttaactcccaaaaggcccagaggaaggccaaagattgttcggatatcatcagctggacccaatgatgtgcttgctgcgagtatgggaagcttgtgtgtacagaagagggggcgtccaaggaagcatttactgcatcttccaactttaactctcaaaaggcccagaggaaggccaaagattgttcggatatcatcagctggacccaatgatgtggtgagaagcatagagatcaaccaatgacaattatgcgtgtgaaatgctagctggcttaaaattgttgaaggatcaagtgaagaaaagaatgagaaaacaagtggcacagatggaccttgaacagattatgggttaaggaatgaaaattcacagtgatttccctagtgaatgtttcagggaaactgactagaagcagaaatgcaatagtaaaaaaggttgtcaggattgcttttatagtgaggaattaagttgtgtaaaattgtactttttttttcaatgttactggtttaaatgtgcgcaactatatatgagtaacctcacagacacagtagttgatttcataatgctgctgtttgctttttacatattttttaaaattgttttgtgtggtaataaaaaatgttttgtttttttaaaaaaaaaaaaaaaaaa

SEQ ID NO: 600 - DNA, 2055 bp, Xenopus laevis
gtgaccagctgagcaggaagtcagactgtagagaggagacccagacaaggggaagaggctggagtgtgagttgctctgataaagacaccgcagacacagacggcacattctgcagaatttcatcctgttgacaaaggatgtacgtgggagtacggtgcagtttccacagagccctctcttctctcttaaccagaggtgcagtccagaacgtcttaagtcgaagatctccttccctctcaagacatgtgcctcagagtaaatcattttccatatcttcttcttataaccagaagcagcagcagcagtcggtccccaggtccccttctgtgtccttgcgtgccagagtcactgtgagctgtattattggtggggcggctctgggtatttggttttatctgcgatgggagaaacaagaacagaagaaagtgcagcaaattcagcagctacgaactcttgcagtgggacaaggagatttcagcctagtggatcacactggtcagcccagaaccaagagcagttggaggggcaattgggtcctgctctactttggcttcactcattgtcctgatatttgtccagatgagcttcaaaaactgagctctgctgtatctctgctggacaaggatccagcactgccccatgttctgcctgtgtttatctcaatagacccagagcgtgacagcgtggaggccatcagcaagtatgtgagcgagttccacccacgactcttggggcttacggggagccccgagcaggtgaaaaaagtcgcacaagaatatcgtgtttactacagtgtggggccaaaagatgaggacaacgattacattttggatcacaccattattatctacctgctgaatcctgatgggctatttacagattactacggccgcgggaagactgatcaggaaatagctgacagcgtgaaaagtcacatgcagacatacacctccgtctttgggtgacaagattttgtcccaaattgcatagaaagctgcgtgacttgaatatagacggtgccttgggaaagtattcagacctttcaccattttatgttgtaactgaattacaaatttgactctgaaattgactctgagcttttttcctgtctgggttattttcaggggcataactaaggggtgctgggccccacagaaacaaaatccaggaccaccccctccatggcatcacgggtgagctccaacacatgcagaactgaggtgcagccataattctgtgtgtccagattatccgcaaccccctgctcccctgggcctccttgtggtcgtggggtctgcacagagttatttttattctatggacttgcttttctattttgtgttatacaacccagttgcatccacagctacacaagcattccacgcatctatctcacttatgcaccttccttgctaactcttagttattatgttgtattcaataccatgcatggaaattgtgccattttgtatgttttatatacaaaattatacattttatgttatgttttgaatgcaatattttaaacataataaatacaattggcaggcacagtcatccccctttccactgagatgaatgctgcattgtctatggcagtggtccccaaccagtagctcgcgagtaacatgttgctccccagccccttggatgttgctcccagtggccccaaagcaggtgattatttttgaattccaggcttggaggcaagtttttgttgcataaaaatcaggtgtactgccaaacagagcctcttgtaggctatcagtccacataggggctaccaaacaagcaataacagcccttatttgacatccccatggacttttccatgcttgtgttgctccccaactcatttttacatttatatgtggctcacgagttaaaaaggttggggacccctggtctatgggaaggtgtttaacagcctatcaatttttcaggaccaataatattcagtttactgatacacactaatgcagatgtttatagatataagaaccaaagacaaaaactgaacagaataaaggataaaatatcaaaaaaaaaaaaaaa

SEQ ID NO: 601 - DNA, 1654 bp, Xenopus laevis
accgagatatacgtcgcttttgtcgcattcgcaaaggcatcaatgtggggctgggtaactctcctgcttccactagacgctgcgagcagagcgctgctgacttcattgtaacaattccattgggcgcctgttgataataaacctttaacatttagcgttagttcagcaggtctactttgctgcttttccgcccaccctgcctgcagcgtgattttatgaaatccccatgtaacagcacagacgcgcacagccagtaataacacagtcactgccatttatgttcaatccataaaagattcaccatctgacccagcggagaaatgtggggtcagtacaaatatactgctctgcccatgggactagatgaagtctatttaccacagtctcctaaatcagtttcatctgatacctggctgacgtggtgttgccataaagcaatatcctgcttgtcgctccttttccttattgtcaccttcccattgtcagcatggtgctttctaaagatggtgcctgattaccaacgtattgtcatattccggcttggacgcgtacaagccgcacgaggcccagggctggttttgttatttcctcttattgaccagtttcagagagtggacatgagaacaaaagcctttagtgtgccaccatctaagttgaaatcacgtgatggtgttctggtgtccatgggagcagatatccagttttgcatttgtgatcctgtgctgtctgtcctgtctgtccaagatctgaattttgtcactcgtaacacagcccagaatctgatgacacagagtcttggacgcaaatatatgcgcgagatacagaatgacagggggcgcatagcggagcacctgaaggaggacctaaatgagcaagtaaagccttggggcctttgtgttgagcgggttgaactggcactagaatccatcttacaaacccctgaaaatgctttgattgtgcctccagttacaccagctgtaccttgtggtggaatcgatcaattgctcatgcaatttcttgcattcacaagacaaagttcaagcaatgatagtccttcacctaaagttgcagatactgagctctcgctaaagcagttgctaactaaactggaggcaagcctgtccgagtcattagtggcggaagtgggtgcctcttatcagctgtatgtgacaatgcatggaggagaaatatctgaatactttctcgatctaaagtcaggttctgggaactgtggttggggagtacatccttgtcctgatgttactttggaaatgacagaagcagacctcatgtcccttatttgtggagacctgcacccactcacagcatataccggagggcgactgcgtgtgagtggcaatatacagactgcacttcaactggaaagagtactaaaagctgcttggcaatgaggcttattcatcttctgtttgaacagcatttacttgttttgggttaatatagaactgatttcaagatgtatttattttttgatagataagagttttaataattcctttattcttatttgttcaaattggtccccaggtgaaacaaattttcacatgatttttggcagcattatcagtgcatattcttttactgatttgacaaataaataaatatatttatacaaggcaaaaaaaaaaaaaaa

SEQ ID NO: 602 - DNA, 2240 bp, Xenopus laevis
gtggtgctagtgatggcctatggcagtctggtctttgtcctgctgttcatttttgtcaagaggcaaatcatgcgctttgcgatgaagtctcgccgggggccacacgtgcccgtaggacacaatgcaccaagggagatgaaggacgagatagacatttgcctctctaaggtccaggacatcaagtttgagcctcagcttttagccgcaggagatgagcgattacttcagctggacagacctggtcaagaaggatgctataattatttatacagaatgaagacagtggatgccattaaggatacagatattccctttcaagaaaacaggaaacaccccaaatctctggtgggcaaaaacttccgtgccttcctgcttgatcttaggaattccagctcgccatacaaagggatccgcaagagtttaatcgactccctgctggatggctatgatactgctcgatatggccccggggtctatggaaagagtgaacatgagaagtttgtggaatccttgagagaactgtcggccattttgcaagcaagagaggcgggcagccagaaacaacgccaatctacagctaaagatctgaccgcttcccccgaggtgccatcaactcccaccatccaggtgacctacctgccctccagccagaagagcaaacgccccaaacatttcctagaattgaaaagctttaaggacaaatataatactctggaaagcactctttgagcacaagcactcagacaggcttccagtcatgaccagtgagcggctcttgggaatcttctcccctgcagcatggcgttccactgggattcggggatggacttggtaaaactctcctggtcacagtgactttcaagtgacttacaagtaactttctagtgagttgcagagatgtaaggggacagatttactaaagggcaaagtgaataatgctggtgacaattcgccatcattaccgcttttaggcactttgctgatttactaaccggcagaggcgtaacttcgccagcgaaagagacagatgctttcgctcattcgaactctatcggcagctgaattttcgctctgttgaatggatgttactccgcaaattcactaagatgcggattttactgaacgtttcctctttcgccagctcagaccaggagaagtacattcttctgttacttacatcatatttttagtgcaaaaagtttctaagtcccaaaaaaaccctagcgacttttcctttttctcagagtgatcgcctgcaaaggtccttaaaattttttttcggtaaccgggttccccatacattttctaacatatggcacataaactatacagtgggctcatgtgtagggcaatataacaactctattgtctttattaaggttccctggacttgtgtaatgtatttgctgcaacatatacgtccattcaactttataatttcccgccgtatgcaaattagcctgagtgaagacctctaacaaagttgcgcataattgaatgctagctgaagtaacgctagtgaaaattcgccagcgtttggcgccctgattgcaacttcgcattttagtaaattggtgttttctgagcaaatgggtaactgtagtgatgggtgcgaagtgagaggactgatttaaatggactgcagtgatttgtacataattcaaacattcctgaccctggctcaggctcggcagccatcttgttctcatggttgcttgcaagccaggactggctcttgcacccctaattaaagtatacattttataattattgcacaaggctgcaggcttcccttttcttaaatgcaggtaggcccacttagacaatgaagggagttattgtcctggctgaacacaggaaataaaacagtccagcagcaggaagtacagagaatttgaagtctgtatctgggtaagttctaggtaaagattggattcacttaccatgggggaggttctcaatagatacagtgtaatgggcccatattgattagataacttattttattactaggggcctttttttaaaattgttcctacttctttcttgtgtttgactctaaattatgcagaaaggccccactacatgaggaatttgtatgtatgtaaatagtttagttatgtggattgttctgcctgttaaaaacaggaaaaatgttttgtatttgacccactgtgtctgtggggaaatctcctgtgactgtgtttaataaacaataaaaccgtaaaaaaaaaaaaaaa

SEQ ID NO: 603 - DNA, 1317 bp, Xenopus laevis
tcctcgtgtggggacgcagttgacgtgaagacttgcagtgacagtagtagcgatgaaggcaatgctcgggataatgaactcatttaggatgactggattttgagatgacagcagcaatacacgtcatgtattatatttgatgattataagcgcttgtccaagcatgctgcttcagagaggctgccgtgctgtggctctcctgctgtctccctacagtaacacgctgctgcctaacgttacccatgtgcctcgccgcctgtcctcctcttcgtggactttggggaagaagcgaagttactggcggtacttgaggagacgcgtgttgggagcagccacacctccgtactcccgtgtcacccagactggtgatccagtgctgcgctgcactgctgcctgtgtcccctcggctcacgtgtcccacccagacacacaggctatcgtgaatcagctggtgagggtcttaagtgccggctgttgcgtggggataagtgcccctcagcttggggtgcctctgcggatcctggcagttgctttcccagaacagatgtgccaggcagtgccccctgaggttcgccaagcgagagagatgagcccattcccgctccaaatatttattaatccagagatgcgaatcctgaactcccagactctcagcttcccagagggctgcagcagcgtccagggattctctgcagtggtgcctcgctactatgccgtggagatatcggggctaaatccaaagggtgaacacattacctggcaggctcagggttgggctgcacgaataatccagcatgagatggaccatctggatggggttctgtacattgataaaatggatcctcggacatttgtcaacatcagctggatggaggttaatgactaggaaagtagaatgcttgaagctccaagattcatgaaatgtgataaatggatctatcatccagatgtaagggcatgtaagggctcttacacatggtcatatttgtttgtgcatttaaaaatgcatgcattgcatttatatacacacaggagtacaaacagtcaggatttaatggaatcagctgatgcgtttaggtttgctccaacctatgttttaaatgcacatcaaactcacacaaacggcctgtgtgtaagagctgttagaatagcattgtttattgcaatcttcaatacagactgtgttctgtgcaagctcatgtttatattgcaaaagactgaaaaaccgggtctattttctgctgaaatggctattctttgttaagacaccaaaaaaatgccttcatactctcctaaaataaaaaaaaaaaaaaaaaa

SEQ ID NO: 604 - DNA, 4444 bp, Xenopus laevis
acacccctaacctgcaggagcggacaatgcagagcgtattggggagaaccctttgaggaaacagcgagcatcactagcactgagctcctcctccccctcctcttcactgcatcacaacccggaacggcccgggctcttttgagcggaggactgagttgcggagcagcgaggtgaggccgctggtagctgcacggagtggtatcgagactgccagctacaaacgcctctcggtgtctggaccgaaccttcaggctgaactagttctcaagcatctccagcaactgcctcgaacaattgtgagtgagtgacagaactgaccacagcacatggagcaagcaggaaaaccgggctcagggcaacctgagcaggggaagtccccatccagttctcttaacccgcagccttcgcagtctgcttctccatcaggccaggatttgcaagttgatgatgcacaggttgggcgacccttggggcctacaccgagccaaagccgctttcaagtggatctggtcactgagggatctaaggaggcagctgcacaggaactacaacagcaagtagatggtgtcaggcatagaggtggctcaggcagtgaggaggcaaaaggacgctttagggttaattttgtggacccagcttctcctggaggtagttcaccagaaaatgcaggggttgatggtggtagtggtggagtgagcttccaaaatggagacactgtcttaagtgaagggagcttacattctggtggaactggacatcattatcattacgatacgcatactaatacttactaccttcgcacttttgggcacaacacaattgatgcggtgccaaggatagactattaccggcacacagctgctgaccttggcgaaaagctactgagacccagtttggcagagctgcatgatgaactggacaaggaacccttcgaagatggctttgcaaatggcgatgaaggaaccccaacaggcgatgcggtcactaatgttgcagatagtaaaggtgtagtgaagtttggttggattaaaggtgttttggtccgatgtatgctaaatatatggggtgtgatgctcttcatcaggttgtcctggattgtgggccaggctggcattgggttgactgttgtagtcatagcaatggctactgtggtgaccaccataacaggactgtctacttcagccattgccaccaatggatttgtgagaggagggggtgcatactacttgatatctcgcagtctcggtccagaatttggtggagcaattggactgatatttgcttttgcaaatgctgtagcaatggcaatgtatgtggtgggttttgcagagactgttgtggaactacttaaggaaaatggtgctcttatggtggatgaatttaatgacatacgaattattggtgcaatcacagttgtgttgttgcttggaatatctgtagcaggaatggagtgggaagcaaaggcacaaattgttctgttaatcattttgctcttggcaattggagacttcttcattggaacagtcattccatctgaagacaaaaaaccaaaaggattcttcggctataaagctgagattttcagtgaaaactttggaccagattttcgaggtgaaacttttttctccgtcttttcaattttctttcctgctgcaactggcatcttagcaggagcaaatatctcaggtgatcttgcggaccctcaacatgccatacctagaggaacattactggccattcttgttacaactgtggtctacatgggtgttgcagtctcagtggggtcatgtgttgtccgtgatgcttctggggatgttaatagcaccctttcagctaccatgacaaattgcactactgcagcatgcaatctgaattatgacttttcatcttgtggacaagactgtaaatatggactaatagaagactttcaggtaatgagcatggtttctggatttgcacccctcatcactgcaggaatcttctctgctactttgtcatctgcccttgcctcgttagtgagtgcaccaaaggtcttccaggctttgtgtaaagacaacatatatcctgggctccagatgtttgctaaaggatacggaaagaacaatgaacccctccgtggctaccttcttactttcataatcgctctgggatttatattaattgctgagctgaacctgattgcacccatcatctccaacttctttctggcatcttatgccttaataaacttctccgtgttccatgcctcccttgccaagtctccaggatggcgtcccgccttcagatactacaacatgtgggtgtcactcgttggagctctcctgtgctgtggagtcatgtttgtcataaactggtgggctgctcttttgacatatgttatcgttattggattgtatatatacgtcacatataagaaacctgatgtcaactggggatcctcaacacaagccttgacatacctgaatgctttgcagcacactattcgtctttcaggtgtagaagaccatgtgaaaaatttcaggccacagtgtcttgtgttaataggagcaccaaattcacgtccagctttgctacacttagtacatgcctttaccaaaaatgtcggtttgatgatctgcgggcatgtgcacatgggtcctcgccgacaagccatgaaagaactacttacagatcaagcacgataccagagatggcttatcaaaaacaagactaaggcattctattcacctgttcatgctgaagacttgcgggacggagcacagtatcttatgcaggctgctgggttaggacggatgaggccaaatacacttgtagttggctttaagaagaactggagtcaatgtgatatgagagaagtggaaacctacattaacttgtttcacgatgcctttgactttcagtatggtgtggttgttatccgattgaaagaaggcttggatatttctcatctccaaggtcaagaggagctgctgtcatctcaagagaaatcgcctggcaccaaagatgttgtggtcaatgtagactacagcaaaaaagctgaagcagaagcttcaggaccatttgccagcgacagcagtcctatgatgcggaaagacgaggaagacgatggcaagacaccaacacaaccactgttgaaaaaagattccaaaggtcaaggtatttcactggacactgccgaccaaaggcttttggatgctagcttgcagtttcaaaagaagcaaggcaaaagcaccattgatgtctggtggctttttgatgacggaggtttaacactgttgattccatatttgattactacaaagaagaagtggagagactgtaagatccgagtatttatcggtggcaaaatcaataggatagatcacgataggagagcaatggcaaccttactcagcaagtttagaattgacttctctgacatcatggtccttggagatatcaacacaaaaccaaagaaagagaatgtggcagcctttgaagagatgattgaaccattcagacttcgcgaggatgaaaaagaacaagaagttgcagacaaaatgaaagaagaagagccctggagaattacagataatgagttagaactttataaaacaaaaacacaccgccagattcgattgaacgagttgttgaaagagcactccagcacagcaaatgtcattgtcatgagccttccagttgcaagaaaaggtgcagtctctagtgccctttatatggcttggatagaggctctctctaaagaccttccaccaatccttcttgtccgtgggaatcatcagagtgtccttacattctactcctaagtattcccagccacacatcccgaggaaacggtacgccagcaccaggagagcaggggtcatcatattctctgcacctttgataggcagaacttgacttttttttttctacgattccataaacttgaaagcacacgaaagaatattactgtatttccatggtctggaaatcagcagttgtactgcttctgttacataacaggtggatcttggcttcataagagagattcctatgtttgggactataatacatggaaatatgtttctctgctacttgaacagcagcaataaaagcgtgattgtttttattttgaccagtgaaaggattctagatttgtaaagcctttagcctcgaggtgcctttgttaaaattaaccaaatttcacccattcccctttttatacacttgtatagattgtacaatctgcctttaactaggactttagatcaaaaaccttcagtttctagactcttccatcctgacgataacttatgctgcttttccgtcttccatcaagctattcatacctattatatgtcataaatgtttgttttcttaagtttcctgtgagataaatgcacagggttgagcaatggacaagtcggttatttcaataataaaaacaaaaccaaaaaaaaaaaaa

SEQ ID NO: 605 - DNA, 2514 bp, Xenopus laevis
aaaatggacaaaggctcgatagaaggaagaagacatcttatactaagcactttccttctgccattcatttcatcactagtttttcttgcaggtgctgagtgtccccctgaaactggttacaaaggggatgtatccttgacaaatgggtataatgaagccagcattgttcactttctttgccccatagggcagtatccatggcctgctaatagtagaatatgtgaggccactggaaagtggagtgttatgcgatccagcacaggaaggatatacaactcaatatcatgcaaaaaaatgctttgccctcagcccgtggcatttgaaaatggtgagttttacccaagggggccctacttcgttggggcaaatataactttcaaatgtaatgatggatacaccctgcgggggtctgtggaaagaacatgcaaaaggaacgccagatggagtggagtgactgcagtttgtgatgatggagctggtcattgtcccaacccaggtatacctcctggtgctatgaagactggtgtgcgatatgacatggacgacagcattaaatatgagtgctcccgtgggctgtcactggtggggtcacccagtaggacatgtctggaaagccggagatggagtgggagagaaatagactgtcaatatgcatactcatttgatctaccagaagatgtgcaggagcagtttaaagcctcgctttcaggaattctgaacattatggaaagaccagcttctttcgggcgaacaataaagataacgaaagatggcattctaaatgtatattttctacttgacgcatctcaaagtgttggtcaagcgaactttgatatatacaaagcatgttcagaatatcttgtagatgagcttgccttgtttgatatgaccatacagtttggaataatctcctatgcaactgtccccaaagtgatcataccaatttatgatgaagagtcagacaacaatgaccatgtgcttactttgattagaaatggtcttaaatacagtgaccacaaagacaagacgggcacaaatactaaagctgctctggaagaaatctacagtatgatgtcatctcaaaaagaaacatacaagaatgaatctgtgtggaattctattcatcatatcattatactgctgacagatgggaaagcaaatttaggtggtcgtcctgcacacacaataaaacgtattgaagatttcctagatattaagcataaaagagaagattatttggatgtttacacatttggaattggtccagaggtagacatggcagacttaagtgaaatggcatcaaagaaggatggtgagacccatgtgtttcgaatggaaagtgcaaatgaaatgaagacagtgtttcagaagatagttgatattaagcactatggcgaaatgtgtggacttaatgatgaatctcaagaatcagagagcagctttcgtttcccatggaatgtcttggtaaaatctcgtaggtccgtgtctggcccttgtttggggtccctaatatctaaatcctgggtcctctctgctgcacattgtttcaaagaaggtgaaccatcagatgcatatgactttgaaattggggggcaaaactacaaggctcaaagaattgagatccataattgttacaatattagtagaaagaaatcgaagaacgtcaatgaagattatgattatgatgtggctttggttcaactaaaacagaatgtgaaattctcaaaggaggccagaccaatttgtatcccatgtactgagccagccaacagagccatgaaaaaattgaaaggatcaacctgcaaagatcacagagagcaactgatgggagtcaatgaaatccctgcaggatatctatctaagaataaacaaaatgagctgatcgaacacagagtttttataaaaaccaacaaggatagagaaacctgtgtggccgctgttcaaaagtggcccaagtttgaacaaatcgatccagttctgatggtttcaccccgacatttatgtgttgagggtaaaatgtcatgtaaaggtgaatcaggtggatctctgtttgttcatcttaggggaaggcggcgcttttttcaggttggtgttctaaactttggaatatttaacccctgcagtcgacctggacaacgtgagcctccacctcctggatctgaacccagagattttcactttgatgtcatacagattttgccctggatgcgcaaacacgttgggaatgaactggagttcttgcctgatattcaaaagcaagatataccagcatgtcctacttgataaaaagtattgacatcattttattttatacctttgtacctgcattagtacgcatgtgcatgtagtatacagattcaagctttttatatacaccagcttgttgttccattatgttgttacactcagcaaaatgacagcttttttgcttctttttcccagaaatacccaacctaaaagtacacaaattaaaaagtgaatggtatgctctgtaaaaaaaaaaaaaaaaaaaaa

SEQ ID NO: 606 - DNA, 1741 bp, Xenopus laevis
cacagaagtggcgccacacaccgtgaacgtcgcggcgtctgacgtagccgctgtttaggaaacacaaccaatcagcaaagagctcagatgccggatgttgagatgacgtgtcagcaagtgtttgacagtcatggcagggccgatgtgcttatgtgggatgatgaggctgttgactgccttgttcatcccagtgctgattaccagcgttggtttgtgcctcatctttgtcttgctttttatttgcactcgattgtgggttcagcgaaagaaaaaggtggaaataggaaaagatgggaaaaagaagaaagtggtggcgttttttcacccatactgcaatgctggaggcggaggagagagagtactgtggtgtgcattgagatccctccagaagaggtacaaagatgcgatctacgtcatttatactggtgataaggatgcctctgaggaacagatccttaacggggctgctgcaagatttaacatcaagctgtcccaccccgtaaggttcattttcctggaaaagcgtggacttgtagaagcaagctgttacccccgttttactttgctgggccagagtcttggctccgttgttttaggctgggaagctcttacgaagtgcgtgccggatatatacattgattctatgggctacgcatttacattgcctctcttcaagtatcttggaggatgccatgttggctgctatgtgcactatccgactatcagcatggatatgctttctgttgtgcgcagtcagcatgcaagattcaacaatgctgcttttatctctaacaatcctgttctaagcagactgaaactgatttattattatctgtttgcactattctatggatgggttggttcatgtagtgacgtcatcatggtgaactcaacatggactttctcccacatccttgacctgtggaaatgtagtgaccgtactagtatagtttatcccccatgtgatgttcagacatttttagagatcgatataaaccaacacaaagaaaacgaggagcattcagttgtttctatagggcagttcaggcctgagaaggaccaccctttgcaaatacgcgcatttgcagccttgctggagaagaaaaccgctgaacaaagagcaaagctgaaactgatcctaattggagggtgtcgcaacgatgaagatgagctccgtgtgtcagagctgaaaaaactcagctcagaactcggaattcctgtggagttcaaagtaaacgttccatttgaggagctaaagaagcatttaagtgaagctaccattggcttgcacaccatgtggaacgagcactttggaattggtgagagtttagccattttgttctgtaaacatattatagcgtccattaatattctactaatggacgcctagcttcagaaggcaagagtgactttgcagccactcatcctccctttatcccttatacttcccactggtttcaattttagtcgttttcatcacagaaggttaggatgggcctgcagagggtccctgtgaaaggattgtttggtggctagcactgacaccagctttaaggcctgagtcgggcttggtttacgttcattgtttctcctactgctgcttgttacgtgttattccatagcacaactttagtctgcccttaaacgggttgttctccttccaaacactttattcagttcagttgttttcagattgttccccagaaataaagactttttttcaattaaaaaaaaaaaaaaa

SEQ ID NO: 607 - DNA, 1477 bp, Xenopus laevis
aaaatcagaagttttttttaatagatggcacggttgtctggagacaggtggctgtgtccaaagtggatggggtctttgaattgtaggatgcccaacccacagaaccccaaggctacatcagctccttcaaaggagagtgaaacacagcctgatgggaaaggaaaagagcaaatcaacccttggagccgtagaggtgccggggtcatttcccaacttcaacagaatcatggggtaatggttaccccttcagctggctttagtccgccctcacagctacaggctcttcttgaagataagaaacaaacagttgtattccatccaaacccatcactgatgcaagtaggtgtgctaaacacagagctcttatctaaactctcaagagacacagcctcccagtctccaataatccatctgtcacctacatcctccacttccatactgaacctgcagcctgcaaggctctaccctgtgatggctaagcacaaaaaccaacatcccatcacacaaggattcaatcttactagcctgggttgggcgcagcaagaagcgcggctgggaaaacctgaagaggttatcctgggtaaaaatagttctacattctcatctctgagccattcgcaacccctaaatacagtgaaaacccaaaagaaacttggagtgcagaacaaggagagccctgagccaatctgccctgtatactaccgaggggcctgcacatttccaggttgtgggaaagcctttgaagaccatcgccattttcttagacaccttcacagtgaccatcatctggatgacaaaagcacagtgcaatgcctcattcagacagaagttgtacacaaactagaagaacagcttgctgtagagaaagagagactccatcatatgcaaagtcagatgagtgggaaactgaacacgcaagccttgcatctgtctaagcagagggaatgtggcctcattctgcacccgacccatcccagtatttcggcttggtccggcctcgatctctccagtcctctgcaaaaggaattctctgataccatcttggcgctgagaaggcagctctgggagggcagcagcctcaatatatttcagaacatggctaactgcattgaatattacaaaacaaacaatgtccgaccaccattcacatatgcctcgctcattcgatgggctatactggagtccccgcagaagcagctggctttgaacgagatctatcactggttcactagaatgtttgctttcttccgatataacacagccacatggaagaatgcagtgcggcacaacctgagtctccataagtgttttgtgagagttgaaaatattaagggggccgtgtggatggtggacgagttggagttccaaagaaagagaggcgtgaggaattcccgctgattccttgtgcccaacggagagcaggtcctttcttattgatcaaacagcgccatgatcccttcccacagtgcaccaggcc

SEQ ID NO: 608 - DNA, 2586 bp, Xenopus laevis
ctgcgggttagcggcgggggacattgctcggtttagtagcggcattttggcctgggtcgggcggtgtctgtgttttttttttttagtcagccgactcctcacgaacaccgagcggctgttgcaacctgagctgctgcagtggcaacaatgtcagtgactggaaacttctttagcaaattaagatccctggcactcactctagagaaggagacagcccaacttgagcaggtgttcggcaatgaagataatgaatatgaagaggaatcaccaatgcgtgtcttgcatgacttgcgttctgacataatggttttgaagggtgattttcagagcactcttgataaaaagctcactagaggccaggaactctcggccttcataaaagcttgcagagtgttgcacgagagatcggcagcggatattgagcagataaaagagacatttcagacctacgggtataaacctctgtgtaatgacaattctgagaatgagcaaacacaagaaagcgagaagcctaaagacaatgacgtgagccccaggaaggcagatgcggaggacttgcctatcctagagaaggcagcaagcacatcatgggatttactgcgtgctccccagctctcggactttggcctttcccattatcagctgccaacggcgtgggaaccacccaaagtgaaaccgtgtccaaagaacccagaggaggagaagccaaggatcatgtataaggatccggaaccaataaatgttgccaaaacccccaaatgtgctcttagacttgaagaggatttttcacagatccaacattttggcattagtgattgcagcacaaatctgaatgatgactatacaatagctctgatcaacaagaatttccagaaaaaacaaaatgatactgaaaatgaaacctgccaagcaaagaatctgaaaagccttctagctactccttcacatctgagccatcgaatggattgtgttgactctcctctgccaccggtgttctttacccctggcttaaaggttcataaaaaggaaaccatatcactgcctgggaagactggggaaaggcaaggcctgaatgcagcagacactgactctacattactttctggtacctgtgatagaaaggactctgacaatgctcatctagaagatgttcatgaatgcacggccatgaagccagcgatggacttaaaaagcatttcagctgcacctccctatctctctttgggctctaattttgacagtgtttactctccgcggcccccagtcttctgcaccccaggtctcaaaacgcacaagaaagaaacgagctctgtgttagtggagcctaaagaggtgacgggctgctctgatactccacctttgccttcctttcaaacaaactggctgaagaacgatactacggaaaaggccttggatattacagaaccagtccctagaccggaactttcctacaggcagtatctggaggaacccccttcactggttctaaattctaataaatatgaagctccagcaatgactgaatacgacattggaacaccaacacgcccagaaatgactgtgtctttaacggaggatctatttaagtataacgtgaagccatcgtctcctcctaagatgtcggaatatgaaaagatgctttggactcccatacgccctgaaatgacatcgtgcataaccgaagatatttcccagattctgtccaagtattgtgacaataacactaatgtggctgataaagagatgtggaataaagcaggagcttcatttgggaaaataagctcagaatatgaggacaaggaaaacagacaatattgattgtgtgacggttctctgtaacaaagacggagcttcagcgccaagcagtgttccttttataaactaagcacgatttacataagtgtttgtctattgtacatatacagcaacgtcagtcagctttggggatcttttacaatctggcctctaatgtccaggcacattccatagatccagtgtgtttggcctgtgctcttgtcgctgcaatccgtaaatcagatgatgaacccaattgtgcgggggaggggggagacatgggttctggctagggatgtaccgaatccactattttggatttggccgaatcctttatgaaacattcggccgaattccgaaccctaatttgaatatgcaaattaagggtgggaaggggaacccattttttacttccttgttttgtgacaaagtcactagatttcccttccctaatttgcatatgcaaattatgatttggttccgcttggcagaagaattcggccgaatcctgctgaaaaaccgaatcctggattagatgcattcctagttctggccattcccagctggtgcagtcacactacagttctgccagactgcacattagggaacccacctatttactgcagatcagtttcattggaaatatcaggactgtatgaaataaatacatttgaccactcccctaattcttcctataaatctagagcagcccttcactttctgtgtatagggtgtgggacaaggatcttttcctgtacaataaattattaatccgttaaaaaaaaaaaaaaa

SEQ ID NO: 609 - DNA, 2747 bp, Xenopus laevis
atctctgtgctgcgcaataagaagaggactgtgtgactgggatccaaagaacccacgtggatgattgagactccgagtatgaaaaatcctttgagatactcttaatgtaaacaagaaattctcctgcaaaaattctgctaaccgtgctgttaaaatgccaaattgcatagtgaaggattgtcgccacaaaagtggacaaaagattcaatacccagatgtcgtccttcacccttttccaaataacataaatatgataaagaactggctgttacagactggtcaggactttggagatattgatgtccttgcagataaaattctgaaaggaaagaaagccgcaaacttccgaatgtgctcgtgtcactttacaagagacagctatatggctaggggttcaaaaacgaccttaaaaccaaatgctatcccaaccatttttcctgtaatactgccaactactgttcctagctcgatattgccaacagcgaagagacagagagtagaagacgaagccccatccacctctgctactgttgtccgtattgtttcaaaacttgtcacagtgcatacacaaactgatgatcgagttttccaaagagacgcgtcagtcaatacgtacaactggccaatacatgtaaatgttgctactcagactgatccaccagtggagactgaagttttagaaactgaaaacagaagtggatctcaagaagaaaagggttgtggtgctgagaaggaccatttatatcaaacaacatccactaaaaaagtaatcaaaaaatcttccaaaacaaataaagataaaccaaccgtacaggagcaagcatgcaatactcttgaatcctttaaatatctagaagaccctttggatccatcatttgatgattctcctggaacgtcatttcatgagcccaatacaaatgctgtacaaagaaactttgtaaaacagaaaaaatttattgtttttgaagactccttggatagacttcttactcttgttcgttgccagcactcacagctgccaccttgtcaagcaccagttagtcacataaaaaaaaaagtagacggaagcatgctaactgtgcatttaacatgcttaaatggtcataaatcatcatggaatacccaaccagcgtttggaaatgtatccattggcaatgttttaatggcctccgcaattctactaagcagtgtttcatttgagaaagttctagaaatgtttaatatttttggaataccagcaatctcacctaagacataccatgaatatcaaggggcgtatatttttccagcagtggactatcagtggaggcttgttgaaagcaagataaaaaaggaattggcagaagatccagttgtagtggcaacaggtaggcaggttgtcgatcttgggcattccaataagtactgtatatcgtccatgatggatgtgatgtccaaaaaaaattgtctctttcaaaattaaaccctttggtccagaaagcacattagtggaaacggagagacacacatttcaagcctgtcttgatcaactaattgatgagaagttggacatcaaaataattgccaccgatcagcaggtcggaatgagaaaactcatggagataaaatatccacgtattgaccaccagctggatgtgtggcagctttgcaaatgcctggccaaaaaattaaaggtggcaagtacaaaacggaattgtgacagcatagccagttggattgattccatcacaaaacatctctggtggtctgcccaaacctgccaacaaaacactgatcttttgattgagaaatggaaatcggttcttttccatgttgcaaatgtgcacagtttcgattcactgaaactctacaaacagtgccagcatggaagcatttcatatgaggatcaattgaacacagattggattcattgcaatcatcctgctcactcagccctggttgaaatagtcaatgatcccgttatgctcgatgatattaaaaagatagaaaaattctgtcacaccagagatttggaggcttttcacagcacaattgagaaattgcagtccgatcacgtatctttgagtactgatgagctatatgtgcgcacggtactggctgctttaacatacaattggaatgtgaccggatcgccgacctccatcatacagccagacacatcttttttgaatattggagaaaactttaaaagtcagtgggtgtccaaatatgagtattgtgaaagttccctctcaaatataatgttagacactgtgaaaatcttgtttggccatcaggaaaataaatggagctcagcttcgaactttcttcctaaaacggtatcctgcaaagcagaggactaaaggctgttgtaatatgggaaccttcattaaaactaggaaaccttaggaaaaatcctatagattggtttgatttacaagaattaaaaatgcagttgtttttgaattgatattgaaaatacatgtttatcaaaaaaaagtgtaaatgttagattttatgttttaactatgttctttataattaggaaaaactcctatagatcggtttgatttacaagaattaaaaatgcagttatttgtgaattgatattgaaaatacacttgttcataaaaaaaaagtataaatgttagatttcatgttttaactatgttctttattattagttgtatattataatgcagcatacatacatagactacatgtagtgacagatgcaaacaaatcttccaaataaaaaaaaaaaaaaa

SEQ ID NO: 610 - DNA, 2339 bp, Xenopus laevis
tattcagtggctcgatgcttcctgctgctgcttcccaagcgcaggggattccacgtagacattaaagcaaaaaaaaaaaaaaaaaaacttgaaaaactttgagacggggggacgggaaaagtttttattttattcttttcccacagccaggtgattgtagaattagcagccatgagtgtggaagctttggggaacacagggatggagcctccatttacaaagcggaacccggcgctgagattagtagacttggcaggggcgcatcatcctcatcatcatcatcatcctcctcacctccctcagagcgtgactggctacccggggtatgtggctcattcccactcaatggctcatgtgcaccctggggagttcgctgctgattctcgcctagggccaagtgctgctttccggacagaacacatagggcatccaggggccctgaaactcagccctgcccataaccctcaccaccgccaccatcaccaccaccatcatcatcatcatatggcaggccacgctgaagtcgcctccagtcaaacaggagcttttgggccggctcagtcaccagctggatcctactcatctctcccccatccagctcaggcaatttgtgcagcaggtagggactggctaataggcagagatgtgacagtaccagtcatgccaggtctcactgagcaacactcaccatctcaccatggaatgtttctttcaacaacaggtagctaccatgggcaccacacggaagctggaagccatccctacttctctggagctcctgagcaagcgtcccatgccaccccaggtgggcagcctctgaacggccacataagactggggctacctggagatatgtacaccaggtctgatcatttctcccagccagtgactaggacagatcattttgcctctccatctcttcacaactactgtggcatgaacctcaacatgaacatcactcctcaccaccatggccctggagccttcttccgttacatgagacaggctatcaaacaagagctcatctgcaagtggatagaggaagatcagctccccaaaaaactctgttctaaaactttcagcaccatgcacgagctggtcacccatgtcaccgtggagcacgttgggggcccagagcagtccaaccacatctgtttctgggaggaatgtccaagagaagggaaacctttcaaggctaaatacaaactggtcaaccacatcagagtgcacacaggtgaaaagcctttcccttgtcccttccctggatgtggcaaagtctttgcgagatcagaaaatctcaagatccacaaaagaactcacacaggagaaaaaccgttcaaatgtgagtttgaaggatgcgacaggcgctttgccaacagcagcgacaggaaaaagcactctcatgtccacaccagcgacaaaccctacaactgcaaagtgagaggctgcgacaagtcgtacacacaccccagctcgttgaggaaacatatgaaagtacactgcaaatcgccacctcccagctcaggctacgaatcctccatcccctccctagtgtccccctcgtcagactcagggcaggaccctggggccacgtcctctcaacctgagcctccgacatcatcgcagggagccaacctgagcgagtggtacgtgtgtcagcagggctcagcggctagcggcatccctactcctcccggcaacactccctcacctgagcataggaagccgtcctacagcaactggcaagccacaaacactttctaaacttcaggcgattcactctcaccactgactttataaagacttgtgagaggggactcgtgtgaattgctaagggctccagtgtaggacacattccatttgctgtgcttaaaagggaagtcttgacttcttgtgggtctccgttttttttttaattatttttatttaataaaagcacaaacaggttttccccctgtccccttgctggtcgtgcatattgttcaacaacaacaagccaaagtgttttgttaatgtaggcaagatcaattgcccaaagctcacactgtccccctggctcttctgttttatattaaagctctttttgttactgctttgtataaaaatccacttttctcagtgactactgccaatcatactgcagctgaaggtcatcccaaggggactgtttgctgggaatcaaatgatgccgggctcagggtggcctcctactgtatcaagtgtgttccttgcagcaggattgtgcgattgtccttgtacagttacaggcagagctttcagcttgtgtgtgacatgtttccatgttaaagatacaatgtggacggtgaattcttcatgtc

SEQ ID NO: 611 - DNA, 2880 bp, Xenopus laevis
cagcgcctggctgtcctagcccggctctggatgtagcccacgtgttgggtaactttaatcgctttcaggaatatatgtcagattatagttcaagaaaaggattagtgtgcgggtgtaaactaaactacgtgcaaagaaagaccaatcctgttaccattgtgtgttttaactgagtgaaggctacctgaggtcttggggagggcacaatgccgtcacttcctctggtgcccagtattcagagtcccgtctcatcatttccggctgtgctggtgcagcaggctgctgtgtcatgtctcaggcaggaagagatggtggtgacagctgttaccggctgcgctgctcccttctgcggcacgagttggacgttcgaggggtggcacgctgccccctttggccaggtgaggggttcgtgtccgtgtcacgtgacaggagcgcacgcctctgggtaccagacagtcctaacagaggattcattgaattgcaatgtatgagtggccactccaactttgtctcgtctgtttgtattttacctccaagtgacctatacccaagaggactgattgctactggagggaatgaccataacatatgtgtattcagtttggacagtgagaagcctctatatacactaaaaggtcatacgaatactgtatgcagtctatcttctggaaaatttgggaccttgctgagtggatcatgggacactacaggaaaggtgtggctaaatgataagtgtatgatgacattacagggtcacacagctgcagtttggtcagtgaaaatactgcctgagcagggcttaatgctcactgcatcagctgataaatctatcaagctctggaaagcaggcagatgtgaaaggacttttcttgggcatgaagattgtgttcgagggcttgctgctataaatgatactgaatttctctcttgttccaatgatgccagtgtcagaagatggctgatcaccggagagtgcctgcaaatatactatggacataccaattatatctatagcatttgtctctttccaaattctcaagattttgtgactacctcagaggacagatccattcgaatctggagaaaaggagagtgtactcagaccattcgtcttcctgctcagtctgtgtggtcttgctgtgttcttgacaatggagacattgttgttggtgcaagcgatggcattataagagtgttcacagagtctccagaccgcatagccagcccagaggaaattcaggcctttgaaaatgaactgtccaaagcaacaattgatcctaaaactggtgaccttggagatattaaaatagaggaccttccaggcagagatcatttgaatgagccaggcaccagggatgggcagacccggctaatcaaagaagatgggaaggttgaagcctaccagtggagcactggtgaaggacgctggatgaaaattggagatgtagtgggctcatctggtgcaacacaacaaacatctggaagagtcttgtttgaagggaaagaatatgattttgtgttcacaattgatgtgaatgaaagtggaccatccttcaagttaccatataacctgacagaggacccttggcttgttgcatacaattttctgcagaaaaatgatctgaatcccatgttcttagatcaagtagccaaatttatcatcgataacactgctggtcagacacagtctacaaacgtgggctttgcagatccgttcacaggtagtgggcggtacattccaggaagttcttctactgataatataggggctgatccatttacaggtggaaatcggtatgtacctggttcatcattgcagtcagactattccacagctgcagctgacccatttacaggaaagaacgcataccgatcatcaactgcaccaaccccaaatacttactttcccaagaaagaaccggtcacatttgatcaagcaaatccatcacaaattctaggaaaacttaaagaactgaatgagtcggctcctgtagaacggaaaataccagaggaagatttaatgcagcttgacaaactgttatctgtagctggcaatccttcaggaggaacagtaacaactcagcagctggataccttgtggagagctgtaaactggcccgaagatattgtgtttccggccttagatgttcttcgtttgtcggtaaagaatcctactgtcaatgaaatgttctacaatgaaaaagaaggcagtcagtttagcagctacctcctccagctcatgagtcccagtggcaaacaagcaaatcagctgcttgcactaaggacagtttgcaattccttcttctgtgatccaggaacttgccttctgatgtcagagagggacactgtcctatcaaaagcgtcagaacttaaaactgtcaacaataagaatatccacatagccctggcaacactgatgcttaactacgcaatctgtttacataaagttagtgatatagaaggaaaggctcagtgtctatcagccatcagttctgttatagaagttgttcaagaccttgaagcaattttcagactgttggtagctcttgggacattaatcagtgatgacaccaatgccgtgcagttagcaaagtccctgggtgttgattctcagatcaaaaaatacatgtctgtcactgaaccagccaaagttaaccagtgctgcaggctccttttaaatattctgtaactattttatttttacttgtggaagaccatatattcccaatgtgtagtgttttcttattacactgtactataaatacattgaaaatgacatgctgtggattgaatgctgatttaaagaaagtttgtagcaaaaaagcaaattggcctgaataaaaattttgcactgaaaaaaaaaaaaaaaaaaaaaaaaaa

SEQ ID NO: 612 - DNA, 3073 bp, Xenopus laevis
cagggagcctccccagcctccggaggaacagccacaatagccacctctgaacaccaggagcaactgcctctgaactaggtggagccattggtcaaggaccatcttagagatgctggtgtcacatgttttccttctaaccctctccctctctgtgccttcacttgggcaatatgagcactggccgtattacccagaatatcaagggcccccagaacccccaccaactcagcccaaaattgtgccacagatccatgtcaggctggcaggggagaagcgaaagcacaatgaggggcgagtggaggtttattatgaaggagagtggggcacagtctgtgatgatgacttctccatgtatgccgcccatatagtctgtagagagttgggctaccaagaagcagtgtcatggtcaccaagctccaagtatggaaaaggagaaggacgtatttggctggataatgtgaattgcaatggaagagagagaagcattgcctcctgtagctctaatggatggggtgtgacagactgcaagcacagtgaggatgttggggtacagtgtagcgaccggaggatccctggatttaaagtcagcaatgagctgccgggacatctggaggggctgaatattcaagtagaagatgtgcgaatccgccctattttgtctgcctatcgtaagcgtgtgccagtgacggaagggtttgcggaagtaaaagtgcaaggcagctggagacaggtgtgcaatactcagtggagcagcaagaacagccgagtggtgtgtggcatgtttggcttcccttcagaaaagaaatacaacaccaaggtgtacaagatgttttcatcccgtcggaagcacacttactggcaattctctgcaaactgcacaggaaacgagccccatctttcttcctgcaaggtggggggtgtcctttcacccgatcccaaaaccaatcagacgtgcagtgatggtgcccctgccgtggtcagctgtacccctggacgggcatttgcccccagtcccggcacaggcttcaggaaagcattccgacaagagcagccactagtacgcctaaggggcggagcaaacgttggagaagggcgcgtggaggttctgaagaatggagaatggggaacagtctgtgatgataagtggaacttggtcaccgccagcgtgatctgcagggaactcgggttcggtagtgccaaggaagctcttgtaggagcacagttgggccaaggaatgggccaaatccatatgagtgagatccagtgcaatggctttgagaagtcactaacagactgtaaattcaacatccactcacaaggctgcaatcatgaggaggacgctgctgtgaggtgcaatgtaccggccatgggctttgaaaaccaggtacgtctgagtggaggacgtcatccaactgagggacgagtggaggttctgatggaacggaatggaaccctgcgctggggaacggtgtgcagtgagacctggggcacgatggaagccatgattgtttgccgccaactgggactgggatttgctagccacgcattccaggagacctggtactggcaaggagatatcaatgccgatgatgttgtcatgagtggagtgaaatgctcaggtacagagatgtctctggcacattgccggcatgatggtgccaacgtcaattgcccccgaggaggaggacgctttgctgctggagtatcttgtgtggagactgccccagatcttgtgctaaatgccgccctggtggagcaaaccacatatctagaggaccggccaatgttcatgctgcagtgtgcccatgaggagcagtgtctggcctcctcagctgatcgcaccagtcccactactggttaccgccgcctcctgcgcttcagctcccagattcacaacaatggtcaggccgacttccgccccaagactggccgacatgcctggatatggcacgactgtcaccgccattaccacagcatggaagttttcacccactacgatctgctgactctgaacgggaccaaagttgcagagggacacaaggccagcttctgcctagaggattccgagtgtgaagcagatatccagaagcagtatgtctgtgctaattttggggagcaagggatcacagtgggctgctgggacctttacagacacgatattgactgtcagtgggttgatatcacagacgttgcgccaggcgattactttttccagattatcattaatccaaaccaggaggtggcagagtccgactatactaataacatcatgaagtgccgctgtcggtatgacggacaacgaatctggatgtacaactgtcatataggtggatcgtacagcacagaaaccgaggagaaatttgaacattttagtgggctcctcaataaccagctctccactcggtagaccgagattccttgcaatgggacaatggcttctataattatacagagggagcaccacctaaccccaaagccagaggggcttgatagaatcatgagctcctgctagaccttccataaccatctgacaatagtgttggctccagcgagtatattatgcattatacattccatcccacttatttctgtgtcattgctcgggactgtttatgtagcacattattcacatgtaatcacgggacctctccagccgtgtgatgtagatcaggcgtgtctggattcctcgggaatgtgggagacatttattcagggcttctgtgacataatccttggtctgtcctaactttgccgtatcacaatatgtatgaaagataagaattgagccaaatgtatatcatgtgaatggcagtccttgagtgtgggtgttgtagggtgaaactaaattcagcaggactctcagctttgcttgttgaaaggtacagtatgttaatctgttcctttgtcaaataagtggtgcagcaccccccccccgtatccctggtcctgcgtcggccttaaattggtgctaccacaacacgactgctgctacccacttgttatattggtgctattaaacctgggagtatgcctacaagcaaaaaaaaaaaaaaaaaaaaaaaaaaaaaaaaaa

SEQ ID NO: 613 - DNA, 1577 bp, Xenopus laevis
cagacaagggagcactgtaacaggcagtgtgagcacaatccgtgtataatcggttcctatacagaggtgttttatcgcgatggctgccggacgcgatggagtgatccatttattgagacaactgcagcgagcatcatgcaggtgtccggctcattctcacacttattctcaagctccagctactgcaagaacaacagactatgcatttgagatggcagtctcaagcattcgatatggagaaaatgttacccaggaaattggcatggacttgcagaattggggaaccaggaatgtctgtgtgatgactgataggaacctttcagagctctcccctgtaaaggctgtattaaattcactagtaaagaatggcatcaacttcaaattatatgacagtgttcgggtggaaccaaccgataaaagctttatggatgctattgagtttgctaagaaaggacagtttgatgcctttgttgctgttggaggaggttctgtaattgacacatgcaaagctgccaacttgtattcttccagccctgattctgatttcctggattatgtcaaccctccaatagggaaaggcaaagcagtgactgtgcctcttaaaccacttattgcagtcccaaccacatctggaaccggaagcgagacaacaggaattgctatattcgactatgaagaactaaaagccaaaacaggtattgcatctagagctattaagcccactttaggtttgattgacccagcacacacactttctatgcctgaaagagtagttgcaaacagcggttttgatgtattgtgccattcccttgagtcctacactgcccttccatataacatgcgcagcccctgtcctaccaacccaattaaccgtccagcttatcaggggagcaaccctattagtgatgtttgggctaaacacgccttgaggatcgtagccaagtttttaaagagagccgtaaggaatcccgatgaccgtgaagctcggttcgccatgcacttggcaagttcatttgcaggagtaggctttggaaatgctggggtacatctttgccacggaatgtcgtaccctattgcaggacatgtgaagacttacagagccaaagattacaaagtggatcatccattagtgccccatggcctttctgttgttctcacatctccggcagtattttcattcacaggattaatgtgtcctgagcgacacctggaggcagcagaaattctgggagctgacctccggactgccaaaatcaaagatgctgggcttatcctggcagacacgctacggaaatttctgtatgacctgaatgttgatgatggtttggcagctgtaggatatactgctgaggatataccggccttggtgaaaggaactttgccccaggaacgagtaacaaagctgtctcctcgagcacattctgaagaggaactagctgcgttgtttgaggcttcaatgaaactttattgataatgtgcacattggttgtcgatccattcaagaacatgcaagtaaaaatattacctctaataaaattggggtcttgtaaaaaaaaaaaaaaaaaaaaaaaaaaaaa

SEQ ID NO: 614 - DNA, 2157 bp, Xenopus laevis
gatcattgtgtgccacgtagaattggataccggtgttgttgcacagtggttgaaacaggctgcagggaaaatgggtcgactttggttgaaaagtggtgttggttgtgccttattggtagctatcttcatgttctgttgtttggtgcacacagccttatcccaggcacatgaggattttcatcatggtcatagccatgcacatcatgggcacagccatggtcaccatggacatggccacagtcatcacggacatgattgtcatggacacgggcattcccatcatggacatagtcatgaggatctaaaccatggtcatagccatgtgcatcatgggcacagccatcaagatcaccatgggcacagccatgaggaaatccagcatgagcatagtccagatcataaagagcagagccatgtagtagaagagcgcaccaaaagagaagcaccaactggagataatttaatacacaatcatgggtcaaaagagaaaatggaacctgtgcaactttggacatatgctatatgtgccacactcctgatatcagctgctcccttcttcatcctcttcctgatacctgtgcagtctaatagcagccagcaccagtccctgctcaaattactcctgagctttgcatcaggggggcttcttggagatgcctttttgcacctcatccctcatgcactagagccacattctgtacatgaagcagttgcagagcctgaagaaacacatggccacggacactctcatggtcaaagccactcccagatgatgttagttggcctttgggtccttgctggaattattgcctttcttgttgttgagaaattcgtgaggcatttgaaaggagaacatggacatggtcacggacacagtcatgctgcaaaggaaaaaatagtggatgatgcaacagagaaggaggaggaaaaagacccagggaaggatggcgtgagacaaagaaagaaaggaagtagcactgtgcagaaaggcaaaaacggcaataaggaaccactacaatcagaaatgaccgtttccggctatttaaatcttgctgctgatttcacacacaacttcactgatggtctagcaattggagcctcgttcctggtcagcagcagtgttggaattgtcaccacaatcacaattctcctacatgaagtgcctcatgaaattggggactttgctatcctggtgcagagtggatgcacaaagaggaaggcaatgatgctacagctcagtacagctttgggagcacttgcaggcaccatttgctctctcttggcagaaggaattggggaagccgcaaccttatggattctgccattcacagcagggggatttatttatattgcaacagtttcagttatcccagaactcctgaaggactcacgccctttgcagtccatccttgaaacctttggactcctccttggggtcgctatgatggttctcattgcacagtttgagtagagtcgctcactgtaaagtcaacaaacagggaaacatgtcgtggaattttgggtctctgtaaggatgagatcatgtgtctttcagggatgtacctttgcaacctattttttctaaagattatgtcatagttagatatatctgatataacctgttgttacttctatttactaggcagtctttattctgcaatactttaatgtccttgggcatctataaaccacagtggaatactgcagagcttttaaaggggaagttaatcttaaaaatacattttagtatggatagacagtcggctacatctcacaatcagggagatatatagtctcctcataaatcttctatgtggttgccagggacatagacctgaaaagctaatgaattccagttttcaagtttaaaaagtgaaacaaatgtgcaggcacacacaacagaccaactgcaaatgtctacaccttagtagaagatattatatctatgatatatgtttgtaattccaagatcgttttcaaccctttttgttttttattttgggaccaaaacctgcaatcacgagacctaccatttttttattagatcaattgtgataactccatcattctacctagctgatattcctgtgaaaatgtgttttttgttttcttaaaataaattagatttatttttttaatatgaaaaaaaaaaaaaaa

SEQ ID NO: 615 - DNA, 2220 bp, Xenopus laevis
agaaacccctaagatagaatctgacgccctctctgtgatagagaagttactggtggcagacattgaaatagtctctaaagcctgtgaatgggagaccgtgtggcttttgctaaagaaagatcttgatgtttatcctgtactcggcatggactgcgaatgggtatctgtagatggaaaagcaagtcctgtatctcttctgcagatggcttcttacagcgggttttgtgtcctggttcgtttgccacaactgacaagttcaggatgcactattccgaagacactacttgaacttttggcaaacagcggtgttctaaaggttggagtaggatgccgggaagactcctctaaattgttgaatgactatggcctttctgtgaaaggatgtgtagatatcagatacctggcaatgagacataggagagatattctccagaacactctgagcctgaagtctctctcggaaactattttatcatttcctttggacaaatctttccagctgagatgcagtaactgggatgccgaggagttcactcagaatcaggttttgtatgctgccagggatgctcaggtatctgttgcccttttcctgcacctccttgggttcttctcagctgatttgccctgcccatgggaatcattgttgggaaaatgccaaggactaatagatgttccctttaaaggaaaagggaatggcttttcaaatggtgaagtgagtggatcctcacgacagaggaaagagagagctggtgatcagtcaacacacaactctcaaggcagagatccctgcaaaaacaaaaagaagccgctgggtgtaggatattctgcaagaaagtcacctttgtatgataactgtttcctgcatgctcctgatggacaaccactgtgtacctgtgataggaaaaaagctcagtggtatttggataaaggaattggagacttggtcagcaccattccattcattgtgaagctgcgatttgagccgtctggccgcccagagtccaaagctgattattatttaactgttaaggagaacctctgtgtcatatgtggaaaaaaggagtcctacataaggaagaacattgtcccacacgagtaccgacgtcactttcctgttcaaatgaaggatcacaactctcacgatgtgcttctcctctgcacttcttgccacgctgtgtctaattactatgattccagcctgaaacacaagctggcagaggagttcaatgctcctattggctgcgaagaaggtgtccgcacgctagaagatcctatacgccgccaggtacgctctgcagctagagctcttctgaatgcagcaaaactaccggagtgtcgcaaggaggagctaatgagtgaaatcagggcattttataacatagaggacgtcactgaagacactataaaagaggctgctggtctggaaaccaggattttcaacgagacctatactccacatggactgaaggtggtgcaggcgtttgccttgggtggcctgaggtctctaatggagctggagaagcggtggcggcagcattttcttgacaccatgcatcccaagcatcttcccccgcagtggtctgttgaccataaccacaacaagcttctcaaaaaacatggcgatgatcttgttgtccagttctgatagcactgctgctctttataaacttggactggttattgggccggggctattgaatatatgagttttaccagtgcaggaccttttatttaaccctattaacatgggatgagtatgaattgccttttaattttgcctgtaaattcaagtacctgtatttatactgttttggtttctgactcctcctgtaaaaccagagattttacttttgtgacgtcactatggaattcttcgtcttgctttgtacaggggagtcgtctttatacaaatctgagcctgttgcccatacgcagtataggtgccacacgaggtaccaattccttgccattcttatacatagataaaatgactgtcctgtgagagtgcgtccattaaactggaaatctggagctccttaaatagcatttctcgatttttcttgtttatcatacttgattatttttagttggatttcctcccatgtgacccattttatcatttatttaattgtcgttttgcggagaaatctcatttttgacttggagacttgcctctcactctgtagaaatgcatgaaaaaaagtaaaaaaaaaaaaaaaa

SEQ ID NO: 616 - DNA, 4316 bp, Xenopus laevis
ggaaaaggaaggaacaggtccggcatgggtggtgtgtgtgtcactactccttgtttgcggctcactggatgacatgctggtaacatttgccagcactctggaattatgtctgaacagttaactctaaaagaaactatggacgagcaaggcgaggatttattcacagatgtggagagtgatgcatttgtcaatgagagtcatggagggatggctttccagcaaaacttcagcgcctggcctggtgcattccaagttgcttggccacttaccaatcatcaggatttggcaagtgaaacccaagacaatgggacaagtgttggagatgatatcgaggtctccctctgtgattaccagcagcaaggccgcagtcgcacatcatccctagtaaatgggttacttacagaactctatgatacttatcgtggtgggacaggctattgctattttcgccaacaggacagtgtggacagttcgactgaagcatctggatcagatgccttcctgagcaggagcaaccctgagtctggattcctgcaagagcttcgtgaacggcagagcagcaggtaccagatgcagtacctgaggcagaaagtttccaatgagttaaaagccataaaggaagaacttaatcaacgcattgcaaatcagtctgctaaactgctgcgccaagtgaagcaaagggatagacttcaacacaaagtgcaaaagaattgtgacattgttactgcatgtctacaagctgtatcacaaaaacgccgagtggacaccaaactgaagtttactcttgaaccgtctctgggtcagaatggatttcagcagtggtatgatgctctcaaagctgtggccagattgccaactgggataccaaaggaatggaggaagagagtatggctcactctggcagatcactatttacacagcatttcaattgattgggataaaacaatgcgcttcacatttaatgaccggagcaatccagatgatgactcaatgggaatacaaattgtaaaggatcttcatagaacaggctgtagctcatattgtggacaagaggcagaacaggatcgagtggtgctgaaacgagttttacttgcctatgccaggtggaacaaaaccattggatactgccaaggattcaatatactggcagcacttatactcgaggttatggaagggaatgaaggagatgctttaaaggtaatgatttatctcatagacaaagtgctaccagacagctattttgccaacaatttgcgagcattatctgtggatatggctgtgtttcgggatctcttgagaatgaaactgcctgaactgtcccagcacctggatgtccttcagagaactgcaaacaaagaaagcggaggaggttatgagccccctcttacaaatgtctttactatgcagtggtttttgacactgtttgcaacatgccttcctaaccacactgttctgaagatttgggattctgtgttctttgaaggttctgagatccttttgcgagtatcgcttgctatctgggccaaattaggagagcagattgaatgctgtcagaattcagatgatttctacagtaccatgggaagactgactcaggagatgcttgaagacagtctcatagacagcaatgaactaatgcagactgtttactcgatggcccagttcccattcccacagttggcagaactgagagaaaaatacacatataatataacacctttcccagcacctgttaagtcagcatcattttctgggcgcacaagcaaaatgcgagacagcgatgaagaaaatgaaatcgatgaagatgatgtaaatgctaattctgttggttgtcttggaccattcagtggctttctggctccagaactacagaaataccagaagcagatcaaagatcataaagaagatcagagcctgaaagctagcaatattgctgaactgagtccaggagcaattgattcctgccggagtgaatatcacgcagtgtttaatagcatgatgatggagcgcatgaccaccgatatcaatgcccttaagcagcagtattccaggattaagaaaagacaacttcagcaaattaaccaagtgtacattgcagcagggcatgaagaagaaaaagcccctgggatcccattagatcccaggcatcagcagaatactgacaaaggtcctgtgagctgtattctgccatctcaggttaatcagtctccggtcattaatcatttattacttggtaagaaactgaagcaagtaaataggtctaaaaatgttgtccatttgccagcatccaaatcatccctcctggccaatgaagaaaccaaagctaaacagaactctccctggcgtacccatataagagttcatcgaaaaaacattgcaagggccaaaggagagcttgcccatggggacaccataggacttatagaggagcagaacgaggtccccaaagatcaaacagatacctcaaaagaaactgaggaaattgcacagcctccttgctccttggcaggggaagaaacaggcttggacagaactgttatgaaggttgatggccgctctccagagcctgtttaccaggatgaaaatgcaaatgtaactgttgtgcagagcaagctagaggctctggagctgagcccagatgctaaaacagaagtcagtttagaaatgagtcagacattccaggagtcgcaatctgattcccatagttcctctagtgaaagtgaatctttaaagaaatctcccaaggcgcaagtatttagccctttcccaagtgtcaaaccacttcgaaaatctgccacagccagaaatttgggtttgtatgggccaaacagtagaacaccaactgtacacttcccacatatgagcaaaaccttcaacaaagctgcaaatggtaccactggcagcaagaagcgataacatgctgttagttttctatgcttatcagagacattgttcttttccttcataggcctgaagcctttgttctttcatccatttcatggcaacgtggctaagtttggtgtttttggtggtgcagagttgtggttctttgtaatccacctatgggatatgggacttgtaggtggcatttaatataggttgcatctctgaaagataattgttgaactatgcatcatttggaaaatatttttctcaaaaatacagtacatgtgtatcatgtatattaatgggtggaaattgacactcttttctgagtgtggtacggtccattcactatttatggcacatttcaactttaaaatggactttattaagatttttcaaatgtatgtacatgttataggagtgcttgctgcagaaactgcttgctatcgtatcagacaacattctagagcacaaaagtgtatggcatcagaggcctgaaagttatctctgtggccagtaaaaatttcagttcttatagactagtaaactgcatttcatctggctttgttacatatacacatcctgcatgtgtatatatatatatatatatatatatatatatatatatgcatgcacaacattgctaggctttgctatctagggataacattgatcaattgtatctgaaaatcatgctcgttgtcataaatttgctgtatatgcacacacattcacacacattttctgtatttgttttaccatgaacctattacggaaatagaaagtaattaacatttttggaaacctgtatttctgaggatttttcccagaggcaaatatgatataatattacaatactgcactttgattgaacagtaaaatattcttgttgttattatattacatgctatttcatttacagtgatgcagaattaagatggtcatgtcctttgattatgtaatgatgagttttggaagactatattgagatgtttcctgggacatgatgtgcattgtcatgtgtctttaacctcactgagcttggaacgtgccattatttatttcaggtttcagaaggtagggttgtacactgctgcatatgggaatgcttgcctcagttatgcatgcattattttgcatcttgtgctcctgtggtcagacatattattggaaagagtcttctagaatacagatatgttcttggtaatcttgagtctatgttcacttaaaaactctgcgggtggaatttcattacctggaaaacgtcatctgtctccaccactgtgtttcctccgtcctctcatagtcacagtgccaaaatgcatggtggaaactaaacatggtgatctgtgtcacagcttatgtttttgtctggcctgtccaagcacttggtaataaagtacctaagcatctttaaaaaaaaaaaaaaa

SEQ ID NO: 617 - DNA, 4940 bp, Xenopus laevis
cgcaccgtcaatcataatagggggaaaaaaaaatcccgcgcctggctctctccgtccgcagcgctgctcgggattattataataactatggcccgcgcctgaataaaccgagcgcggcccgccagtgtggggtttggtgcgaactgggggtttttactaatcctgccacaaacacaatgaccgctccggagcagcccgtcaaacgagaagaaatggccgccctggaagtagacggtcagagtgaatatctgcagcaacacggagacagcagcagcgccggcgatgacagcgaccaaggcggtgggcagacagaggatttggcatcagtgcagatttcaggaggcccaaatagatgggaagtattgactcctgcacaggctgctttaaaagatgaagctggaaacattgtacagattccaggtggtgctacagtaacatcaagtggacagtatgttctgccaattcagactctgcaaaaccaacatttgttttctgtagcaccaggatcagacactgctaatggtactttgtctaatgtccaatatcaagtaataccacagctccagacatctgatggacaacaagtccagcttggcttcaccacttcctctgataatggaggcctggaccaggatggtggtcaaattcagttaattcctggaaaccattcagggagtcttttgtcctcaagctcaaacatattaacacaatctggtcaaattcagcagattcagggggtaaccattgggggtacatcctatgctggccaaacacaagttgttgcgaacgtccctcttggactacctggtaacattacctttgttcccataaatagtgttgaccttgattctttaggtctgacaggcagcactgaagccatgaccgcaggccttactgcggatggacatttgataagtggacaaggtatagaaaactctgataattcagaaaggactgcagaacatgaacatgtttctcctgatggtggggatctcaactcagatacagatttgtttgtgccaacatcgtcttcatctcagcttcctgttactattgatgggacaggaatgcttcagcaaaatgtaaacagtttgactgacagtccaagtgggcacatgcaaacatctgaactccatggaaattacatccagacatcaatgactgatgagtcacagaatattcaggtttccacctcgcagccaatggtacagcagattcaacttcatgatagtcagcctaccagtcaagcccaacttgtgcagagcattgcacagcaggcaatccaagctgttcagggtggagctcaaggtttatcttcccaagctttgcaaaacctccagttgcagcttaacccaggaacattcttaattcaggctcaaacagtgactccttctggccagattgcttggcagacatttcaagttcaaggcgtgcagaacttgcaaaatttacagattccaaattcttctgcgcaacagataaccttgacacctgtgcaaactctcacactcggccaagtttcaggagggggtactcctgttagtttgaatgctggccagttgccaaatctacagactgttacagttaactctgttgatgcagctggaatacagttgcatcatagtgaaaactctgacagccctacagctataaggattaaagaggaagaacctgatccagacgaatggcaacttcttggtgactctactgtgaataccaatgatttaacacatttgagagtccaggttgttgatgatgagctggaccaaccaaaccaagagggaaaaagactgagaagagtagcttgcacttgccctaattgcaaagatggtgctggaaggggcaccaaccttggaaaaaagaaacagcacatttgtcacatcccaggatgtggcaaagtttatggaaaaacttcacatctgagagcccatcttcgctggcattcaggggaacgtccttttgtttgtacttggatgttttgtggtaagcgttttactcgaagcgatgagttacagcggcatagaagaacgcatactggtgaaaagaagtttgtctgccctgagtgttccaaacgttttatgagaagtgaccaccttgccaaacacattaagacacatcagaataagaaaggcattcacgccagcagttcagttctggcatcaatagaagcaaagcctgaagataccttgataactacagacggaacaaccttaatccttgcaaacattcagcagggttccatatctggcataggaactataaatactggcaccagcaatcaagatctcctttccaattccgagatccctttacaacttgttgcagtttccggaaatgagacaattgagtaatgatcccacgacacctattaatgttggttatttttatacattagtgagataaagaaaccttgttcttgagttcttagatatctttttattgatgtgcaaacttttttggattgaaagtaacttggttatatatgacactgaaatgccttactttgtatgctattccataagtttgatgaaaaggtaaaatgtgcatggcttttgtaggtacttttggaatctagtacagatgatctaattttaccatgatacatacaagtataaataatgttgacagatggaaatgatagtctaaccaaatgcatcaatccagtgtggtttagtgtaaaaaaaaaagacaacccaaaaattaaaaaaaaaaaatacaaaaagaaacagaaaaaaatgaagaacatgttggtatttatctattgtaagataacaaagttgatgggtgaaaaagacgttatgataatgaaattttgtaattttctcaatgactggaattttttaagtatgcataactgacaaatcacgtttcccagcaaatactatgtagacttggctttatcttcattcaccaacttatcagttaacagtcaaaatatatatatattttttttttttttaaattaggtaaaaactgtacaccgttttaagcatttttcttgtaaaaatatacagcaaggttttaacatggaactgtaggcaacggctgctgtctaagaatgttttgaaaagccatgtgcaagatttcatttgccaaaacatgatcttgttcaaattgtttgtcctgacggcaatatataaccattgttgaaagtaggtttaaaagaatttcaagtggtttaatgttatgacttaagcacccactttatgaacactggtggaccaaaaatgattgtgaactgtgtttagcacatcttcctttcaatcttgtgtgtatccaacagcttcaaacccttcattgtaaattcattgtaaatgaacaagtaaagcgtttgcaaacatgatttttatctttccatagtcaaaccacaaggcatacaaatcctagtcctgggtactggggagatatacatgggtgtttattttattttcctttcatttagttttgtgaatcggcatttaaacaccttttttttttctttatcctattttctttgttttgttgcttctacccattaaaaattgtatgtatcgaatacatttacctgataaatatgtatattttttttttattacgtggctgtattttcgttttattttttaattgtttatatttgcaacaatagaaaagtgtaaaaaaaaaaaaaattttacaaagttacattgcaggaatgtaagtgctattccatttttctaagacgtagtagaaataaaagaaaataaactgcagcggctcccaacagttcacctagttgcaggctttgtttgggtctctgttattcctaccacctcagatttaaaaaaaataaaagctaccttgaagtctatgttccaaatgtattataacagtgtggtagttaataaaacactattttctttcttttgacttgctgttttgctattcattatcagataaagagagatgcaccctttccttgcaaagttaaatgcaggtaattattgtatatattttattcatgagcgacatttatggaggggacctcccacatatattttaatccttttacgtgcagctgcatcttatcacaatgagatattaacaaataaaaaaaatcttgcatttttatctatatatatatatatatatatatatatatatatatatatatatatatctttgagcaggaatcgctcaatggcctcaaatcaacagaagccgcgaatacattttgggtttactgtaaatagttacaggctaaatataaagtattttgaccacttgtctctctttaccaatgtttatgattggaagatgaatactgtatcatagatgggttgcttatatggttaaaattcttgttttatgcattaacgtccatttcatagataaaatgaaagactgatgagattttggggggtttttttcttttttaaatccatttaaacgaatttgtaatgtttttttgtcacttgtagatgattttattgcatagattggagaaagtgttttgtgttctatgtttatgcttcagtatggttcttaatcctagatggctgtattttaagcatgttcctataactagctcacttaaaatgtttgtttgttgccacaagagagaccacttcggtatcacaaatgcaacgttaaatgtttttttcactttttattgggctcttcctaccctgctgttcaaatttcctatataatacaataatgattgttaatgtccaactttgtttttgttttttgaaagccagatttttatttacctctcttaggtttatcagctttctgggtctttttatgaagaacatcatttcaacaggaatctacaacttttgatattatgcagccctattgcaggcaagcaccttaccatatatatctgtaactgcaacaaccattgtacagttgtatgtaatattaaatgttacggcttgttcacaaagcattaaaaaaaaaaaaaaaaaaaaaaaaaa

SEQ ID NO: 618 - DNA, 4710 bp, Xenopus laevis
cccacgcgtccggtcggtcatttacctgaagaggcggcggcggcataagatgagctgctcaaagcgtagcttcatacaggaaagatctcgctcttcagaacaagtcaagaggctgctgctgctgctgtttgtgttgctaaacccaccggcactgttacttgcctgtgctccatttatgagctgctcacaatagaatctcttgaatattgaaggtcttgtcccaaaacaaaacaaattataagaaaatagaaatggcaaatcgagtaaaagcaaagcctgtgtctgacaagcctggaagtccataccggactgttagccattttgagacgctggccaccatacacattccaggtgccgacacgcttgacaaactatttgaacatggggtggcaacatttggaaagaaagactgtctgagcacacgagaaattctaagtgaagaaaatgagaagcaacccaatgggaaagtgtttaagaagctgattttgggagaatacaaatggctcagttatgaagaagtaagcttgagagtgcaccatcttgggagtggcctgtctgccctaggattgaaaccaaagagcacaatagcaatattttgtgagaccagagcagagtggatgatcactgcacaggcatgctttaaatacaattttcccttggtgactttgtatgcaacacttggagaagaagcagtagcgtatggtttaaatgaatctggagcaagctatctcttaaccagtgctgaacttcttgagaccaagctgaagaatgttctttcccaagttacaggccttaagcatatcatttatgttggcaagagaaacataaacaaagcagattatcctgccagcctagagatccataacatagaggcagtggaagaattgggagccaaaccagaaaacttgagtaaaccaccatgtagaccgctaccttcagacttagctgttgtgatgtataccagcggttcaaccggcagacccaaaggcgtaatgatgattcacagcaacctcatagctggcatggctggacagtgtgaacgaataccaggactcggcccacaggatacctatattggctacttgcctttagcacatgttctggagatgactgcagagatatcctgtgttacctatggttgtagaattgggtattcatctcctttaacactgtcagatcagtctagcaaaattaagaagggaagtaaaggtgactgtactgtcctgaggccaacactgatggctgcagtgcctgaaattatggatcggatttataaaaatgtcatgagtaaagtacaggaaatgaatgtaatacaacgcactttgtttaaactcgggtatgattacaaactggagcagataaagaaaggatatgatgctccactctgtaacatgttgctctttaaaaaagtcaaagctttactcggtgggaacgtacggatgatgctgtgtgggggagccccactatccccacaaacacagcgttttatgaatatttgtttctgctgccctgttggccagggttatggattaacagaaacatgtggggctggcactattacagaagtttgtgactatagcactggcagagtgggggctccgctgacctgctgtgaaattaaactacgggactggcaagaaggtggttatacaaatatggataagccacatccaaggggagagataattattggagggcaaaatgtttcagtggggtattttaaaaatgaagacaagaccatggaagatttctatgttgatgaaaacggacaacggtggttttgtacgggcgacattggagaatttcacccagatggctgcttacaaataattgatcgcaaaaaggatcttgtgaaattacaagctggggagtacgtgtctctgggaaaagtggaagcagcgttgaagaactctccacttgttgacaacatttgtgcttatgccaacagttttcattcctacgtgatcagctttgtggttcctaatcaaaagaagctgacgagtttagccgaacagaaaggcatcgatggaacttgggaggaaatctgtaacagtcctgtaatggagactgaagtattaaaggagattaaggaggttgccaactcattgaagttagagcggtttgaaattcctatcaaagtacgactgagtccggatccctggacccccgaaacaggcctggtaacagatgcattcaaactgaagaggaaagagttgaagaaccactatataactgatatcgaacgcatgtatggagggaaataggaccaaagacttttgtctttttgtggttgtgtgtatttttttattttttagtgcagaggaaactttcaattgacttcatacaatctcagtgtggagtggtgaccatgcctgtgtcaatgcatgtttgtgaagatctacagacttgacagtctagtttaagggttgtttttgcccattattatatattttatggatctctagcagaaatcaggggtttttggagtataagcaatgtcatgactttggaatttgcttggtttattgggtggattagccttctaatccttcaaggaacaaagttttaactccttaatattcgctgaaaaatacatgagactataaaaatctccattacctctgtgtgcaagattgtggcaacccttgaactgatgcagtggtttggtgtccttgccaactatacttaatggtctgtagccttactaatactatatgtgcacacaccccacccctggccagtagaaccgaaatggtaaaatccagttcctccactgcatgaaagtattaacagaaagaacaagtctgtattttccagaagcttggaaaactccttggccctgatgaaaaactactactagctgcatatattgataacatggatcatacatgaaccatttgctgctttttgaaagtgttcccatagaaatgttaactaaaattcagggatatattaaaaaaaagataaatgtttatctaactagaatagtccggtttaagcatgatttaattaaccctctctgttaccctataaatttattttgccctaagtagcatttaggttcttaaatgtatacagtcatgggaaaaaatgtttcagaattcatcagttaatagtgttgctccagcagaattctgtactgaaatctgtttctcaaaagagcaaataatttttcttatatttaattttgaaatctgacatggggctagacatattgtcaatttcccagctgcccccagtcatgtgacttgtgctctgataaacttcagtcactctgctgtactgcaagttcgagtgatatcaccctccattccccccccccccagcagcctaacaacagaacaatgggaaggtaatcagatagcagctccctaatacaaaataacaactgcctggtagatcgaagaacagcactcaatagtaaaatccaggtcccactgtgacacattcagttacattgaataggagaatcaacaacctgccagaaagcagttccatcctaaagtgctggctctttctgaaagcacatgaccaggcaaaatgacctgagttggctacatacacaccaatattacaactttacacttgctggttcagaaataaaattttatatggtagagtgaattatttgcagagtaaacaatgcaatttagaaataaaaactacatcataaaaataatgacagaatatatttaagtactgagccatgtcttcctagcaaggctggaagttataaatgacacctttgtattctagaactttttcctcaatccactgtgtatcgacaatccctttttgtctcttacatcgctggaagtcttccaccactttcttgtttgaaattccccccccccccagtacaggacggcaatacacatctgagctgtatgctgtaggcctttcacacaataatatgcctattatatttagtagtacttatgttgctcctctttaaagtaaggtgaaatactgtgctagtcacatcaaggggatgatggcctcctcgtttgtcctgtgtgctttatactgtatgtccagcaaatagattatagactattaaatgtcagtagggtagtttcagtatttggtgagctctaactcctaaccacccttgatggtagatatgtgcataagaagtgagagccctatagcacacgagctttctcaaagtaatgtatcggagaagagaaaatcagtcaatatatatacagtatatattcggattgtaacgggtgtacttggatagctaagtaggtttaaagaaataatatttaaaactagttaatagtgtgtcacttgcccttgactttgtagctatttattttctagatctgccctgtttcagaaaaaatagcaatataacataatatatactgaatccaaattggagttcttttgggcagaggagtgggggagatcccaaagactgaaggtttgtaataaattgtagctgtttgtataaagttatttatttgctccccacggaagggaaaatgtgtaattaagatacaaacatgagtaaatctctaaagtcgagactgtgctacctttttgggtcatgggtgacaaactatccatctgtacaaagagagttctcttaaagctccagtcggatgagtgagcaggcatgaacacccatggccttagattgcccatcactgtattagtgggttgaatataaagcagaaatactgtaaaaaaaaaaaaaaa

SEQ ID NO: 619 - DNA, 4517 bp, Xenopus laevis
gggagaactggctgtcttacttcttctaaaacttgggagaaagtgtcccgggctgggaggctgaaggggccactgtgctctcaagggccccagatttccccccagaggagccttttattgcaacagtctaaagagagacatttcccagcaaccccccaaaagtaatcctaccccccaactccaccccagttctcagcttcagcaacaatgtgacaaatgcagaggaaatcctacagcaggcttaatggaactacgtatggtatgggggatccccaagtgaacactacacctaagtgggagccccccaaaaaacaaaaagtcactcgatcgtcacccattggctttgatattccagtctgtattgaccaggggcaagaaaatcctcttcaacctgtgaaactacaaatatctcatctggaggacccctgaggatattttttggggggttataaccctgcttcccatgccatggctaatttttgagactcacatgactgtgtagcccacgtggcgatgggtcgggagaatgaactgattcaggctgtgaaaagcggagatgttggtaccgttcaaaaattgctggcgaaagtgcgaactcccaaaagtaagctcctgggatcaaccaaaagactgaatgttaatcaccaggatgccgacgggttctctgcccttcaccatgctgccctcactggaaactcagagcttctccttttgctgttggaaacgcaggcttccgtggacatcaaagatgggaacggaatgcgacccctccattacgcagcttggcagggccaaccagaacctgtgcgcctcttgcttcgagcctctgccagtgttaatgctgcatccaatgatggacagatcccactgcacttggctgcccagtatggtcactatgaagtgtcggagactcttctgcagcaccagtcgaacccctgttatgttaacaagggaaagaaaacccccttggatctagcctgtgaattcggaagagtgaaagtggttcatctgctgttaaacagtcacctgtgcgtctctctcttggaaggcactactaaagatccaacagatacaaatttcaccacaccgcttcacttggctgcaaaaaatggtcacctggaagtaatcaggttgctgctcaaatcaggcattgagattaacaaggtgaccaagatgggcactgctttgcacgaggccgccctttgtggaaagactgaagtggtgaagctactgatagagaatggcgtcgatgtgaatattcggaacacatacaatcagacagcactggatatagtcaatcagtttactacaacccacgccagtactgacatcaagcagcttctcagagaagcatctggcatactgaaggtccgagcgctgaaggatttttggaacgctcatgacccaacagccctaaacgtccgagctggagatctgataacggtcttggagcagcactctgatggccgctggaagggtcacattcatgatcctcagaaaggaactgaccgtgttggtttctttcctccatccattgttgaggttatcagcaaaaggctgggctctacactgtctcgtaacatcaccgtgccttcgcatcagcgcgtggcaaagactgccctcactctgccaattcagcacagtccaataacaggttctcagcttggcattaaccctgaaacatcaatagctggcgaccgtcacagtgtgggcagtgagagcagtgtacggagtgcgggcagtggccagagctgcgagggacagctggtaaacacagcgctgctcatagaaaatgcacagacgatgcaccttggctcagaaaatctgcagaactgccaaacattcccaggccctgttttaggactccacctgtccaccattctaccagtagagaaagacccttgggtttatccacaaggaaaggatgctgagcagatattttgctggctacgtggcttccagatggaaacatatgtgggaaactttatttcggccggctatgaccttccaacaatcatgcgggtgaccccagaggacttgacagccattggagtgacaaagccaggacacaggaaaaagatttccaccgagatcggcaagctgatagtagcagatggcttaccccagcatacacccgtggacctatgggactggctttctcagttggggttgccagagtaccacaagcaactatctgaaaatggctatgaatctctgagcactgtgacagaactaacatgggagggactgcaggagattgggatccacagattagggcatcaaaagaagcttcttttgggcgtgaaacgcttgcttgatcttcagaagggttaccctatcgggggaacactaagacggaggattctagggtcccaagacactgttgctgttgtggagtcacctgaaaatggagatttcccaatcacacccaagctgctgacctttcaaggagcagaactgagccgtgagctgcaaagcgccctgactcgggggaatgaaccgttgtgtacaggaaggaggtctttcagccaggagagcattagctctcgttctcagggttccggccattcccaggaatccgcttcctcttttcctgttctgcctcttcaccctcaaggagtagatgtaaaccttccagaaaggaatcacccggaagggacagaccagacccttcatcaccaccaggtgaccaacggatgtctgattcagccagagccacctgcacccccacccaagcctgcacttaaaaagcgttctctcagtgcttgtcgttatgcattgtctgatggagaaccagaagaagaggaggagaagaaaatagctacacctggcacagcgacacttagctcatacgccaccttaactaggcgtcctgggcgcagctccttgactaatgggcagccggagaaaaaggttcaacgtagccaatcatttgcggttagagcacgtagaaaggggcctcctccgccacctccaaaaagactcagttccatgtccagtgtagagggacaatctcctgaaggacagagctcagtaaggaccattgctgcacaactagaggatatgggaagcgggacaggattttctgccagcaccagcaaagccccccacacagaagtgctggatgtttctggaacacgcagaaggactgtgagtgagtctgctgctggacacagtgggagactttccctccctttgaccacaaaaaaagatgaggagaggaaggaggagcctatttcttcacaaaacagttctagtgagagcattccttttgcagaagagggtaatctcaccattaaacagcgccccaaacctcctggggccaagttggagcaagaggtcacatcagaactcatttccactcaagagtcacaattacagtctgctgagactcagcttcattcagagacctctgccattctcgctaaacctgtccctgtagccttaccacagccccgacctcagatagcagccaaaccccaaattgggccaaagccagatacaggggccagggcaccgccagccacatctacaccaaagaatgtggagcacgattttaaccttacagaatcagacacagtaaagaggaggccaagggtgaaggaaaaggaagaagagagtcccaaggcagcactggcaatcagttcttcatctctcattccaccacaagaacccctgacgcaagatactttgagggccaaaatagcagatatagataaaagactcttgagctttgaggtagtggaggatccagtgaaaacaagtggaataaatacaaggagcacaggtatctccgtctctcagactcatcttgtcatttctggcccccagcaagttttacagaaaccctctagagcagtaactggtcctttgctccctgccgggtctattctatgggataaagagtcagtggccccaagcagggaacggacttgcatttctcagcagagcatttccatttcggaccagggacctccagtatttaccagttcgctacagaacacaggggaactacaagaccctagggaaaaaagttgcagggaaactgtgcaactaaccaagaacatccttgacgacatcagcaccatgttcgacgacctagctgagcaactggaagccatgttggattgaggcctattttatttcttgactctgctcagagacataagtcagttaatggataaatataactgccagaaaccctgaccgtgcctaaaggagaagttatttccactgcggtaatgcagtgctcagtatccgggtgtcacgggggggttctagattactaacaagttctatttcgtgcttgttaatagctgcctttttcacagtacagttatcagtcgctgctgtttcgctttccacgtttgcatttcgctcaatgttaacgcttgaatgcaaatatctggaaaactgtaaaaagacgtgtggtttttgttaagaaaatattttatgttaaaagtgcttttatatttacatatctataaatatggttactaatcaaaaaaaaaaaaaaa

SEQ ID NO: 620 - DNA, 1375 bp, Xenopus laevis
tccaacctatttacaacaagggcaactgctgtcctctcttccaagccaactgctcttccacaggctgaccattagccgacagaggattttttttacagcctggaaaaaagaaaaagaaggagggagggggggacagagattttttttccctatgttggaggggagttgaatttgtcctgtatgtggtaagtctcggttactgttaactgtgcgcaactggagatttagacgcaggatcccgtgcgctctaggacatacccaggactatggacataactgaatctggtttgtcaatcgagtgatggatgttggtgccttattctctgcacaagataaagtcctggggctcctcggccagcagctctcccgttgccatctactttatctacactctctcatccttccagtatgtttctttccatgaggcgtttgctcattccgacagcctcagtacaatgtggaaatggatactgacacatagtgccccaggcttctcccacttgccccgctctttgctgctcttctttctcgtcgcctccatttctgtcacctgcaatgaggccagggccagggactggctgcgctccgcggaggcgtcctccaactcttcgtccggtcggcacgtgcggagctataaccacctccagggagacgtgcggagcaggaaactcttctcttacactaagtactttctccagatcgatggcaacggcacagtcagcggcaccaagagggagaattgcccttacagtatactggagataacatctgtggacgtgggggttgtggcagtgaaagccattaacagcaattattacttagccatgaataggagaggaaagatctacggttcgaaagtattcaatattgattgcaagctgaaagagagaatagaggagaatggctacaacacctatgcatcacataactggaagaacaacgagagacaaatgtttgtggccttaaatggtaaaggggttccaaagagaggaccaaaaacaagacggaaaaatacttcggctcattttcttccaattgttgtataacctcaaatgaaggaattgacacatttctgtattaaataagtactttcttcatctataatgtgtactcacctccttatttcattctaatggggaggtccaagatggataatgtacgcacatttggattttagaaggacactttttttattgactttgtggtgactgtggccagattgagaaggaaagcagccagtacctgtgtcacatagaattatatttgtacagtccgattttaagggatacaagacaatcaaattatctactgggaaagttatttatggattactttattcaaatcaaagactttctcgctcattcacttccacgat

SEQ ID NO: 621 - DNA, 3312 bp, Xenopus laevis
atggcgggcggcggagggagccagcttctggaagccttggatagatctcagtcaaggaaagatggaggctttagtaattgcagtttttacaactccgaggacagtgaagatgatacagaaaaagatgaagcaaatctgctgagtttagatgaaagtgatgatgctgacttacaaattacagaacaaaagccaaaacaccttagaagtggaacagctagagctcttggagactctattaaaacatatgagcgaagaggcaggacattgcacttcacagctttaaaaggcaatgctattggattaaacatgttgggagccagtaaaaagcttggggaaaatgcccaaaacataccagttactagtggaacaatagtacagggcagaattttccatcacacaaatattccaaggtcaactgtcaagactgctgcacagaggaaggaatacccagcccatgtgcaaaaggttgactcggatcaaggaagattacatacttctctaaaatcagaaaacgtgcaggaaagaaaagaagactctaactttgaatctgaaccagagaagataaaaagaaaggctcagcagagacgacatagtagtgtaccagagtgtgatatgtctttgactcgcactccacaaatgtgtttaaccctcccagagggcgtcagacaagctgaggagctgcagttttgcacagtgtgtgtaaaagaaaataaaaagactaaatgccaaagtactgaaagttctcaaagactttgcaagcagcccattgcactaaatgaactctctccattacctcggcctgctattcatcaaattgatggaagaactgccaaactagcatttaacgttaaaagtttctatagctcaacgtgtaatcaacttatacccaatgactttgttcagcaatatcctgcaaatgggaaattggccagtgaaggaaatacaagtaaagctgcaaaaaatatgagactaagaagtgcaggatcgtcagaaccaaatgaccccattgtactgtctagtgatgatgaagacaatgctagcactggaagcacaaaccgaattgaaagcatatctccccggcctgctgattctgcctgctcttcacctgctccctcatcaggaaaagtagaagctgctttgaaggaaaatagtttcacttttgagcataagttttgtaatagcgccattgatgctgcaagcactatcgcattacccagaaaagcaaaaatgaaagatcagtttggtaatacagtcagccgtacccccgttaaaagacgcaaagtttttgctccagagacaccacctgagcctgcgccagatgccaactcaaactgtgaaagtcttgtcatgaactgccgaagtgttcggatagggtcatattatagagaggcgatagagcatgttgtgttttctatggactttataacaataagatgggaagttcttcctgaagatggtaattctcaagagttagtcctatacccatccgaacttacaaagtgtgagtggtgtgcagttcgtaagctccctgttgtctttttccaaactttacctgctgcttgtcaaagcctacgatcccgtcttaaattgagtagagaaaatggtactggatggtatgattgcagagcaacaaatctggaagaacagttcatcgttttaatctttgaaaatgctccagatatgaaagcaactgtagggttcgaaacaattctgtacaatataggtataaaaaatggtatcaaaaacttttttatcaaaattccctttgaagatgccaatggcagacttgttgcttttacaaaaaacagcgaagacattccagtgatgggttcaacacagaaggaaaacatagaaaaaaatgctgcaacagaaacaaggatgaaattaagaaactcttctcagcttcagttttttggggatgatgagggagacacccacacagtgtttgtagggccagtagaaaagctgattgtttatccacctcctcctgctaaaggtgggatctctgtgactaatgaagatctccattgtcttaatgaaggggagtttttaaatgatgtaataattgatttctatttaaagtatttggttcttgaaaagctgagaaaagatgcagacagaatacatatttttagttctttcttctataaaagacttaatcagagagaaagaaggaacctccaaccccctgcaaacttaacattacagcaaagaagacacggaagagtaaaaacatggactcgacatgttgatatttttcaaaaggatttcatatttgttccgcttaacgaagctgctcattggtttttggctgtcatttgtttccctggattagaaaagccagagcattacccaaatccttactatcaaggagtttcttccacggctacagtaggagaaggagataacaccagtgcttctcttcctcagaatgcttcagagactactttacaaggtgcttcttccaattcaccactaaagaaaacactcggcaaaaacactgggacagatgctattgatacactgggacctaaacgtaatcacagcttaacacggcaccgatcaagaaaaagtgatcaagggcttcaagaagaagatgtttctatgaaacctgtattttcagactctgaaacaagcaataatgatataaacggagcaacaaatgagtgtaaaacaccagtaaaaccgagagatggtttgcacagaattcagataagctatacagaaacaacagatgatactaagaaatctgaagatgaattcatagatttctctgatgatcaggataatatggatgaatgcagtgatgatgcaagccttacagatgaaaattatacgtcagaggctggaaaatggcatctgaaacaattcttttgcaagcagccatgtattcttctaatggattctctgagaggtccttctcgttccacagtggtcaaaacactacgagagtatcttgaggtggaatgggaagtccgaaaaggaagtaaaagaagtttttccaaagatgtcatgaaaggttctagtaccagagtgcctcaacaaaacaacctcagtgattgtggtgtttatattttgcagtatgtggaaagcttttttgagaaccctattcagagttttgacctgcctatgaatttaatggattggttccctcaacaaagaatgaaaacaaagcgggaagaaatctgcaaccttatccttactctgcagggactccaaagcaaagagaagaaagggaacaaggagcctagcacaatgcagcatgctgcacaggagaaaccagagccgtgtatcagcagtggctcagactga

SEQ ID NO: 622 - DNA, 811 bp, Xenopus laevis
ttctctgatgcttatcaagctggcatgattgttgattctccaaaaattaagaatttggttatgtcatatttggaagaaaagaaagggaagccatttgagctggcagttgatgctggctgtgggacagggaggtccactcggactttggctccatatttccagaaggtgattggaatagatgtaagtgagtcccagttaagtgtggccagaaaatgtacttcacatgagaacatctcttaccagatttccccggctgaggagctgcctctggaagatgcatcagtggatctgattaatgcaggccttgctgctcattggttcaatcctgagaaatttggacaggaagcagctcgggtgcttaaacatggaggctgtttggccttacattctttttcattggtatttgagattgagtataaggacaagtcagaggaactaactgctgccttaagtgaggcttggaaaattctctttgaatataataagaaagttgatggtgaaattaaagctatgtatcaggaattattcagagccataccatttaaagataagcaaaggatcaacggcatctgtgaagtatttttcttaacagtctctgaaataatgagtttccttcaggcaatatgttcgtacaaaaagttcctagagcaagacaaagataaggccacagcatttctacaaggtttagagaaaaggtttttagatatattgggtgaacctgcctctgatgttcttctaggatttcatgtatattatttctgtcttcttgcatccaaaccttgaattgcctttaactgtcaaacctgcaccc

SEQ ID NO: 623 - DNA, 1073 bp, Xenopus laevis
  modified_base (946)..(946): a, c, t, g, unknown or other
  modified_base (959)..(959): a, c, t, g, unknown or other
  modified_base (970)..(970): a, c, t, g, unknown or other
  modified_base (976)..(976): a, c, t, g, unknown or other
  modified_base (989)..(989): a, c, t, g, unknown or other
  modified_base (1034)..(1034): a, c, t, g, unknown or other
  modified_base (1036)..(1036): a, c, t, g, unknown or other
ggtcgatagaacagccactaaagactaaagcagtgcactaaagcagcactaaagcagtgcgggtggaacagacgctatggaagaccacatcggttggtctggtctataggatggtagcacacagtaaggtggaagcagataatgcagttgcagatagaagatctccgcacctggaagcttcagtctctgatcgttcacaaatccaacctgccagagcactccatcccagcccaggacgtgccactcctgctttgctgctcagtgatacccacttccgcaccttccgctcacactcggatttcactgtcatcaccaagaccagtagcatgctggatacttgcggcttctactggggacctatggatgtcaacgtggctcacgacaagctcaaatcggagcccataggtaccttcctcatcagggacagtaaacaaaagaactgtttctttgcaatcagtgttaaaacagccagggaaactgtcagcatccggattaagtttcatgctggtaaattcagcctagatggcagcaaagagttgttcagttgcctctttcagctggtggaacattacatgacttctccgaagaagatgctggtttctcctttaaggaaagtcaggttacgacctttgcaagaactctgccgaaaaagcatcttagcgacttttgggaggcagaacctggacagtatccccttgaacagggtgttaaaggactacctaaagtctttcccgtttcagatctaacgcagggcattaacgacccgggacacaagaactaaacgtgttacaaacgccgcctccgtggattattttttaaaccttatttaactgtggtcaagtttatttttgtagcaatttaactgtattttgggatgaaacttgaacacttgacttttaatgtttacatgaaaatattgtttggcacaaagtaacaaggtgaatanccccttgaaattngtgtctgctgngcagancactattttattncattttaagtaattaactttaataaactttattatgaaatattcngnaaaaaaaaccaaaaaaaaaaaaaaaaaaaaaaaaaaa

SEQ ID NO: 624 - DNA, 941 bp, Xenopus laevis
aactttgccagaagagggagagagagagaaggcaaatgctcccccagctgtttcctgtctacagtgtctgtgtaatgtagataaatgtgaggattttctctaaatccctcttctgtttgctaaatctcactgtcactgctaaaatcagagcagatagtctacgcaatggaacaaagtcctctatattgaaatgtgacattgctctgaacatctccactggattccttttattatcacagctgaccattccattcccagtctctgctctcctcagaagccatggaaacaaacaacaatctttcaacacaattatttaagtgctacttttgtgatatcttaaagctgaagatgcacaaaatgtcctgcattcatctgctctacctggttttgtgtttcctgactttaacccattcagcagctgctggaccagagaccctctgtggtgctgaactggtagacactcttcagtttgtctgtggagacagaggcttctattttagcaagccaacagggtacggatccaacaatcgaagatcgcatcacagaggaatagtagatgagtgctgtttccaaagctgtgatttcagaaggctagagatgtactgcgctccagccaagccagccaaatcagcacgttctgtacgtgctcaacgtcacactgatatgccaaaagcccagaaggaagtacacccgaagaatacaagtcgaggaaacacaggaagtcgaggattccgaatgtaaatgctgccactaaaaatcttggagtatgaatgtaccatctgcaggatacttttactgtatggaaaaggaacaaaaaacagtggaagatatcaaacaattatctgactatgaacaagttttaacaacatctcaaccaatgggcattctccctctaaacaattcaaatacacattccaatgttataaacattcttgccagct

SEQ ID NO: 625 - DNA, 1684 bp, Xenopus laevis
ctgccttctgctctgctgccatgtgcgtgtggtaaaaatggctgctcctacagcaaaggaaagaaaagcatgctgggatgctcgagatgaatactggcagtgcttggatgctaataatgaagatgcctcaaagtgtcagaaattgagacacggctttacaaacaactgtccacaacaatggatgaaatactttgataaaagaagagactacttgaaatataaagaaaagctccaaggaggaagcacaacagaaaccacagaaaagtcataagacttaaaaaggaaccatattaaaaaaactataagaggcttgaaaatatttcaatgttttttttttttttcataaaagaaaatgtacaatagaagatgtgtcatttgaatcacaagttccagcatatttacttcctaaaacttcactgataaataaggtacctggttatgaacatacatacgcaaagtcgacaataggagctacgcacatatgtatgtaagtgaaagatgattagccaattatattgaagcaaaagactaagatctcctaatttttttatggtcactagttacatctgtggctataataaaattggccatgcctgtcactgtgtgtttaacttgtgacaatactgtaactttcagcttaaatacaaacaaatatttatcatttggaggtatgggaagtttaatatataaatctatacatatacatgattaaaggtcttttttgtttttgtagcttgtggtcctgttcaatatcccagagttgcatatttatttatgatggagtacttagtaacttacaaggtttctgtaaggtttttcttttcctttaaagggcatgtaggggcaggggaatgaaatcccatttttgctttctttgatgggaaggaaacctatctccaatatactttgattgaaagatgtgtaccgtttttgtgggagacctgactgtgtgcagtgaggttctcccttcgtttgctgctgtggatgggaattgtcagatggtccctggctgctgagcagggaggcaatcgtgcttgtgggcagcggggggagcccccgccttgcttcccagccatgcagagctcgggcagctttgtttgggacggtccctgagcagcccgggccacactgagcatgtgcacagtcttagtcttgcggagatgtgtggcagggttgcggggtggtgaccccctgtggccaactttgagagcataaatgatttgtttgattgggcttgtggtgcagtgggttcatgtttatatttagtatacaagatatacagcatttatagccttattctattttagactttacatgccctttaagcagaatagcaatgccgttatcattttacgggatctctctgtacaagctaggagtacatttagagtgctgctgcattgctgggtgtagaagtagtaatacaggagtactaggaatgatactgtaattccaatgctgatattgtttttgggtacctcactgtgcactctgaggtatgcaaaaagaaaattaaatattcatattaatattttagtccattagaagaaatgtaagattctattgattttttttctattaaaacccccttctgtatcagtttacagtaatgtgacacaaataaaccactttactgtttaaaaaaaaagtagaaaaaaaaaaagaaaacaaaaaaaaaaaaaaa

SEQ ID NO: 626 - DNA, 725 bp, Xenopus laevis
ggacatttcggtttggttggaggtgcattgagaatcatcatggcggctggactacttactaaacctcagatgagaggccttcttggtaaacgtctccgcttccatattattggggctttcgttgtctctttgggggttgctgctatgtataagtttggagtggcagatccaaggaagaaggcgtacgcagactactataagaactttgatgcaatgaaggagtatgaagccatgagagaagcaggtgtattccaaagcgtgcgaccaaaaggcgaatagagtgcatcctatttacaggaggagaatgcagaatttgcttcagaatattcctaaatggtctctttgctggacatactgaatgcctcaaatgttttactattctatgtaaatgtggttcaatatacaaatgagaaataagtgttttactttgccctttattcctacaagtaattaattgcaaagctagatttacgtatgcacgcattggagactaaactgtcgaacaggaggagtttgcctagaagttgtgatcttgctggagactctggtttaatgtcttgtgatgctgtacaaggtgcttaatttggtgtccctattatattggtgcaggtgcagtaggggctacagtgcaacatttaaacctgtgtcacagaccaactgcatgaattgaaatacacattgtccagtgataaataaaactacgcaaactcaaaaaaaaaaaaaaa

SEQ ID NO: 627 - DNA, 3241 bp, Xenopus laevis
ggacgccacaccctgctatgcgcatgcgtgggctcggatacgctcaaagtgacttaaggaaaagtagaattcacggaaactcctgtgtttttttttttctccccccctctccttaccggaactttaaaactatttacggatacggcgcaagatttcagggattggttctatttaatcggaaagatttagcccggggatcgcctcttcgctcccgaggattattattacccatgattccacagccgggcaaagcactcgtggatccaggcgtctctgcggagcggtagtagtagatgaagatgtcagaaagtggtttgcgttgcgcctcttgccgagtatcagcagcagcagggaattggtaggaagtgaaagaagccagcgaatattgtgcgtatatcccgtcatccctctcgcacgacgcttctccactgtgtgaaactttgccactagctgagccgggctttactttcgcctgcgctgttgagccctagttgcagtcgctccgtgcgcctcacagcgttttggcctgacagcagcgaggagagccattaaatatttagcttctacttggatcccttggcgtgtctctgcggcggacgagtaaaggagtaggatgaacacgaacatcatgtacgccagcaggaagaggagaaaacccgtccagaaaacaattaagccaacccagtctgaaggtgtcaagtccaacccgtcaaagaggcacagagatcggctcaacactgagttggacagattggcaagcctgcttccattctcagacgagatcatatcaaaacttgacaagctttcagtgcttagactcagtgttagttatttgagggccaagggtttttttgaagtggcactgcagcagaacaagaaagatggtaacagcagagcacagaagcaatcagatttgcgctcactggaaggtgaactcttgttgcaggctcttaatggatttgtcttggtaattgcctctgatggattggtcttttttgcatcttccactattcaggactacctgggtttccagcaatctgatgtaattcaccaaagtgtttatgagttaatacataccgaggatcgcattgagttccaacgtcagcttcactgggcttttgacccagcccatccctcaagctctttacagagatccccagatgatacagcactaacatgctttaaaccagaacagctccctcctgaaaattcttccttcatggaaaggaattttgtctgcaggttaagatgccttctggataattcttctggatttttggcaatgaactttcaaggtcggctgaagtttctgcatggacagaataagaaagggaaagatgggtccacgcttccccctcagctagccctattcacattggcgactccattacagtccccttcaatcctggagatacgaaccaaaaacttcattttcagaaccaagcacagactagacttcacaccaattggctgtgatgcaaaaggcagtgtggtactgggatatacagaagctgagctatgtgtgagaggaactggataccaatttattcatgctgcagatatgctctattgtgcagagaatcatgtccgaatgatcaagacgggggaaagtggcatgacagtgttcagactcctttctagagatactggatggatttgggttcaagcaaatgctcgcctcgtttacaaaaatgggaggccagattatataattgcagcacaaagagcactaacagaggaagaaggagcagaacatttgcggaagagaagttccaaactgcccttccttttcacaactggagaggcagttctttatgaagcttcatttcctttacagaccattatggaggttacaccaacgaaagcgaagacaacctccgccaaaggcagttcttccaaaaatgaatctccagtaaatcctgcctcgctcttgggggctatgatgagacaggacgaatctgtatacaactgtccacccgcgtcaaacaaattttcttttgacgctggttttcaagatctcacaagtgaagtgagaaataactttacctgtaattggcaagagagttgtttaccctccctaaagcttgagggaggagcttgttcccagggaaatttggcacatacctcggattgtccagaagtgtttcctgaaagcaaaaatgacgaactttataatattatgaatagccttggcattgattttgacgacttggaaatgatccagcaggatgaagcattttttaggaatgaatttgattatccggaccttatggatattgatgtggcagatgaaatactgacttatgttcaagagactctaaacaaaaaagcagactgtatgtttatgaacaatgtccagccaatgccttgtgtgcaagagccgtccagtatgacacaggatcctgtggtgaatccaccacaaatacctcacccaaccataatgatgccccaacaactgtgtcagaaaatgaagcacatgcaagtcaatggcatgcttacaaactggaattctttgagcagtgtccctccaacttttcaagagcagcagtccgagcgatacaatatttccagtataaacaacatgactcatgaactttacaaatcagaacttagcagtgccccctatgcttgcaagcaggagtatatgccttatcaggagtccttgcccttagtgccactaccttcgaaccttactcagatggactttgatcttgagaatgtggaaagatcaatttatcctaatccttcaaacatggaggggtttctggaatgtttaccacagaactctggaatccaagaatgtggattagattcacaggcaatcatggtgactccccagtcttgctattctggtgctgtatcaatgtatcagtgcctacctgaatcatccccggcaacgtgcctgaatcaaatgcaatataatgcagtcatggcagctcagcagccactatttaacaaattccaaaatggatttaatagagacaatgttaatgagacgtatgctacacccgtagatattgtaaacagtgccccagctgccaaccatcttccgcctcatcacctccaacatcacccagcggattccaaacatttccctgatctacaatcaagtggattcatgtaaataactgtgaggagagcaccattttcttctgccctaaataaacaagacttcatactgaaaatgctttaaaagctttatcacatcctaaaaaaaaaaaaaaaaaaaaaaaaaaaaaaa

SEQ ID NO: 628 - DNA, 2200 bp, Xenopus laevis
cgcagaggctgagagcagccaagtcataacctggaaagggagctgaagccggcttgggccgcctttattaactcgctttctcatgataggatgcaacatggcggcagcaatggaaactgaacaaattggggtagaaatatttgagtctgcaagaagccatggaagttcggagtccactgggggggacctcaaatccgagcctttctttgttgagcgccattcctggagccagatgcgcaaactgctagcagacactaggaaataccatggctacatgatggctaaggcacctcatagcttcacatttgtaaagaggaatgatcttgagagtcctcattctgatcgcatgtactacctgggtacatgaggaacaagtccatacaaaaattgcactaagacagtacaaaacgaatgcattatttcatatagagagataacggttcacagacagacatttgattaaggggctgatttatcaaaaatccagttcttttctgaacactgaaaaaaacacggagaagaaaatatgaacaattattttctgaaacctcaactggtcagaatttattaaagacaaaaaacgtgaaaagtcagagccagaaaaaacttgttgtatagaagtcagtgggaatattctctaacaactttattttcccagtttattaaacatttgagattctcagtctaattgaaattgaatggaacaatgtgattccctctggcatgcaacttttattcttccacaaaaaaatgcacgtggtaataatgttttgagggttttttttttccttaaataggctagcattcaagaatgctagcctatcgagatgatgcaatagccaccaccctccatctggccctctctcatatagacaaacaagacacctacgttcgaatgctgttcatagacttcagttcagcattcaacactatcattcctcagcatctgatagaaaagttgagcctctgaaacatcatctccagaaccaccacactgagcactggagcccctcaaggctgtgtgcttagtcctctactgttcactctgctgacgcatgactgtgcagccacacaccgcacaaatcacatcataaagttcgctgatgacacgactgtggtgggtctcatcagcaataatgacgagtcaccattcagagaggagcagcggttaacagaatggtgcagagccaaaaacctgtctctcaatgtagacaaaacaaaggagatggttgttgactttaagaagactaggagtgaccacctgccaaggtacatcgacggctctaatgtcaaaagcactaaatttcttggtgtccacctggcggagaacctcacctgggcccacaacaccagctacttagccaagaaagcccaacagcacctctacttcctgtgcaagctgagcaaatcccatctcccaccatccatactcaaaaccttctacagagggactatcgagagcatcctcagcagctgtatcactgtctgggctgggaactgcactgtcatggagcacaagaccctacagaggatagtgaagacagcagagaagatcttaggtgtctctcttcctgccatcagggacatttacacctctcgctgcatccgtaaaggctccagcattgtggctgacccaacacccccttgcactcactgttcacactcctgccatctggaataaggtacagaagcattagggccctcactaccagactgttacagtttcatcccccaagccaaaaggctcctgaatactcagggacgggacagatctctcacacacacactccatctgactttactatataccacaacgttacacagccactgtacgccattgtaaaaataaatagccattggatacaattgttctctatgagcacatctgcactttatcatgttctttatcatgttcttactactatcatatcacaatgatacacccatcatgtctgacgtttagcattatttacttagcatattatatctgctgagtgtgcactgtcttgttctgtccctgcactatgctgtcttgtcttgcacttgcactttttgtctgttgtccggtacatgtgtgtagaaccatggtcctagaggaacgttgtttcgtttcactgtgtactgtacaaacgtatatggatgaaatgacaataaactcaatcttgactcttgaaaaaaaaaaaaaaaaaaaaaaaaaaaa

SEQ ID NO: 629 - DNA, 528 bp, Xenopus laevis
atgggaaagatcttcttctacgaggaaaggaacttccaaggtcgccactatgagtgtggctcagactattctgacctgtcctcatacttcaatcgctgtaactccatcagggtagagggtggaaactggatcctctatgagcaccccagttataagggaaaccaatattatctctggaaaggagaatacccagattttcagagatggatgggcttcaatgactccattagatcctgtcgctttcttcccaattaccaaggccaatacaaaatgagaatatacgaaagaggagactaccaaggacagatgatggagttctttgatgactgccccaatacttatgagcgattcaatttccatgacattcactcctgcaatgtgtttgatggccactggatgttctacgaggaacccaactacagaggacgtcagtactacctgagacctggagaatacaggagatacaatgattggggagcctcaagtcctagaattggctcatttagaagagtttatcacaggttttaa

SEQ ID NO: 630 - DNA, 2199 bp, Xenopus laevis
cggcgagcagttcatctaaatccaatcgcctgtaactgcgctgcagcaaccatgtccaagggaccagcagttggaattgatcttggcaccacttactcttgtgtgggtgtcttccagcatggcaaagtagagatcattgccaatgaccaaggaaataggaccacacccagttatgtggcttttacagatacagaaaggctgatcggagatgcagctaaaaatcaagttgccatgaaccccacaaacacagtttttgatgccaagcgacttattggccgcagatttgaagatgcggttgttcagtctgacatgaagcactggcctttcactgttgtgagtgatggtggcagacccaaaggccaggtagaatataaagccgagaccaaatctttctatccggaggaagtatcctctatggttttaacgaagatgaaggaaatagctgaagcttaccttggcaagacggtgacaaatgctgtagttactgttccagcatatttcaatgactcccagcgacaggctactaaggatgccggtaccatatctgggctgaatgtgttgagaatcattaatgagccaactgctgctgccatagcttatggactggataagaaggttggagtagaaaggaatgtactgatctttgatctcggtggtggcacctttgatgtctccattctaaccattgaagatggaatctttgaagtaaagtctactgctggtgacactcacttggggggtgaagacttcgataatcgtatggtgaaccactttgttgcagaatttaagaggaagcacaagaaggacatcattgacaacaagagagctgttcgccgtctccgtactgcttgtgagcgtgcaaaggtacagctctcctccagcactcaggctagcattgaaattgattcactctatgaaggaattgacttctatacctccataacaagagcacgttttgaagaactcaatgccgatctcttcagaggtacccttgaccctgttgaaaaatcacttcgtgatgctaagcttgacaagtctcaaatacatgatattgtattggtgggtggatccacccgtatacctaaaatccagaaacttcttcaagattttttcaatggaaaggagttgaacaagagcatcaaccctgatgaagctgttgcctatggtgcagctgtacaggcagccatcttatctggtgacaagtcagagaatgttcaggacctcctgctgcttgatgttacacctctatcccttggtattgagacagctggtggtgtcatgactgttctgatcaagcgaaacacaaccatttcccacaaaagccagacacaaacattcacaacatactctgacaaccagcctggagtcttaattcaggtatacgagggaggaagggcaatgaccaaagataacaacttgttgggcaaatttgagctgactggcatccctcctgctccccgaggtgttcctcagattgaggtgacttttgacattgatgccaatggtatcttaaatgtgtctgctgttgacaagagtactggcaaagagaacaaaatcaccattaccaatgacaaaggccgccttagtaaggaagatattgaacgtatggttcaagaagctgagaccacaaagctgaagatgagcaagcaaagggacaaggtgtcttcaaagaattccctagaatcctatgcatttaacatgaagtctactgttgaagacgaaaaacttcaaggaaaaatcagtgatgaagataaacaaaaaatcctggagaaatgcaatgaagttgtatcttggctggacaaaaatcagactgcagaaaaagaagagtttgaacatcaacaaaaggagctggagaaggtgtgcaaccccattattacaaagttataccagggtgcaggtggcatgccaggtggtatgcctggtggcttcccaggtgctggtgctgctccatcaggtggagcatcctctggtcctacaattgaagaggttgactaagctgcattccactcctattatttgtcttgtaactccagggacacacacgtattactagctgttcaattttctcatgtacgctcgtgtattaatttttgggacattgatacttgaattcactccaagtctggaaaacaccctagcagctggtctgtttaaacttttggatccagtcaaataaaatgtgtttaattggctacttca

SEQ ID NO: 631 - DNA, 1452 bp, Xenopus laevis
atgcagtcagaatctggaattgttcctgacttcgacattggcgaagaatttcacgaagagcccaagacctattatgagctgaaaagtcaaccgctgaaatacagcagctcagcggagcactgcggagcttccaagccgcctctaagctcctccagtatgacatcacggattttgctacgacagcaactgatgcgtgagcagatgcaacagcaagagcgacgagagcagcaacagaagcagcaggcagctcagttcatgcaacagagagcggccgtcagccacacgccagccattaacgtctccagcagcctgcctgcctcctcccaggtaccaatggaagtactcaaggtgcagacccaccttgaaaatcctaccaagtaccacatccaacaagctcagaaacagcaggtaaagcaatacctgactacggccaaacactccggccaggcgttaagcttaccctgtccaaaccagcctggtgatcacatcatgccccctggaccgggaagcagcgcgccaaacagtccaatggctttgttaacaattggttcaacctgtgaaaaagagatggatgatgtgattgatgatataataagcttggagtccagttataatgaagacattctcttaatggatccttctatgcaaatggcaaacacgctgcctgtctctggtaatttgattgacatttatggaaatcaaggtatgcctcctccggggttaaacatcagtaattcttgccctgctaatctgcccaatatcaaaagggagttcacagaatcggaggcacgagcaatggccaaggaacggcaaaagaaggacaatcacaacctcattgaaagaaggcgaagatttaacatcaacgatcgcattaaagaattaggcactttaatacccaaatcgaatgaccctgacatgaggtggaacaagggaacgatattgaaagcctcagtggattacattcgcaaactgcaacgagaacaacatcgatcaaaagaggttgagaataagcagaagaaactggagcatgccaaccggcatctgctcctgaggatacaggagctagagatgcaggctcgcgcacacggcctctctattatgccttctaccggcctctgctcgacagaccttgtcaacagagtcattaaacaagagccaatgcttgacagttgcaatcgagagatgctgcaaaaccaccatgatctctccgtcacgaccactttagatcttaccgacggaaccatcacgttcagcaacaacctgagaaacatgactgactccccaacagcctacagtatcgccaccaagctgggttctaaactggaagacatattcatggacgatacactttctccaagagtaaatgacccatatcacaccatatctcctggggcctccaaaacaagcagcagaagcagcagcatcagcatggaagaaaatgatcactgttag

SEQ ID NO: 632 - DNA, 1383 bp, Xenopus laevis
cggacgcgtgggctaatgcttttcagtcgcagcgacacgcgttcagtcaaaggcaccgtcaccgcaatgatcaagaaaatgtgccccagcgacatgaacatcccggccaagaactgttaccgcatggtcatcctgggctcctccaaggtgggcaagacctccatcgtgtcgcgcttcctgagcggccgattcgacgagcaatacacgccgaccatcgaggacttccaccgaaagttctacagcatccgaggagacgtctaccagctggatatcctcgatacctcgggcaatcaccccttcccggccatgagaagactctccatcctcaccggagatgtcttcatcttggtcttcagcttggacaacagggactcctttgaggaggtgcagaagctgaagcagcagatcatggagaccaagtcctgtctgaagaacaaaaccaaggagaatgtggatgttcccatcgttatatgtgggaataaagtggaccgggatttctacagggaagtgcaagcccatgagattgatcagctggttggagaggacagtaaatgctcttactttgaggtctctgccaagaagaactccagcctggatgagatgtttaaagctctcttcaccatggccaagctgcccagtgagatgagcccagacatgcaccgcaaggtgtctgtccagtactgtgagatcttgcacaagaagtccctgaagagcaagaaagtcaaggaggatggggatgcctatggcattgtagctccctttgcccgcagacccagtatccacagtgacttaatgtacattagagccaaggccataggaggcggccagagtaaagacaaagagaggtgtgtgattagctaggacttcatagatccagcacggatgtctttataaatatatacatagagaaacacaaaggccgtgttgtttttggaagaagccaaagccgagatggcatgaccgttgaggggttctacttgcccctccatgccttctgatggttggtcaggctgctgtggaaaaggagaatcgagcctgatggggcagacgttgttggaagatgcactgaagttgtgcaggagctttcacctgatgatgggactggtggagttgacgctctttactttgagaaactccgtgatccgttgaacctcccaggctgggtacaactctggactgaatgtggggggagggatgttaataactgtacaaggactgatttaaacaaaagaaaaacgagatttgtttacatggtgccattgtgctctcactctgagtattggatgagaacaaatccaaagtgttgatactttgtgctttattttcagtgtctttatttttctactcaataaaaacagagtgaaatccaaaaaaaaaaaaaaa

SEQ ID NO: 633 - DNA, 733 bp, Xenopus laevis
cgcttaatgggcgtcgctcggaggaggcttgtggcttgaccgtgcttcttcgaattcaagaaccaacatggcgctaagtgccctaaggagcgattcgtatgtggatctgagtcagtatcgggaccagcacttccggggaaaccgatctgatcaggagtctctgctgaagcaaagctgcaccttgtatgtaggaaacctttcattttatacaacagaggaacaaatccatgaactgttcagcaagagtggagatgttaaaagaattgtaatgggacttgataaggtcaaaaagactgcctgcggattctgttttgtcgaatactatacaagagcagatgcagaacaagcaatgaggttcatcaatggaacacggctagatgatcgaatcgtcagaacagactgggatgcaggatttaaggaagggagacagtatggacgtgggaaatcaggtggtcaggtcagagatgagtaccgccaagactacgatgcaggacgcggaggctatggaaaagttgttcagtcgttctgaagtacaacaatatttgtgtccatggatatctgccacccttcacctccaaaactgattttacttgacactcgctggcattacaatgcttacattggactgtatgttgggagtatcaaactgtgttctaaaccccttttaataactgtatatgtatggatttcttttttttacaataaaactcaaaatgggaaaaaaaaaaaaaaa

SEQ ID NO: 634 - DNA, 1115 bp, Xenopus laevis
atccaatggctggtgttacatcacttactcacacactcactactggagagcctgtctgtcattgtacttcatgtagaaaccccctgccatgaagcaaagtagggcttctgtttagtttccagaaggaaatagaattagtcagctcctgaagtcgccatgttcgggtcctcgcgagcaggtgtgcgcggggggcaagatcagttcaactgggaagatgtcaaaaccgataaacagcgggaaaattacctgggaaactcagtaatggcgcccgtaggccgttggcagaagggcaaggatctgacgtggtatgccaagcagaaggacggaggggcaaagctctcacgagaacaggagctggctgccgttaaacaggccgaagaggaagccatgttggccgcactgggctataagaatgtcaagcgtcagcctactggccttagcaaggaggagtttgctgaagcgtgcaagagggaagggacggagagagacgagaaagacgtggacagagtcatgggcttaggaagctccagtgtgagctccagcagaatgatgctgtcaaaggaagacaaagaagcagcaaaaaagggcttctccattttcacacaccagaaaacacaagaagcagccggcgacaagaggaaaactgaagcagcagaggaagagtcgaaagtcagcagaaagaaggccaagaaggaaaagaagaagaagaaaaagaaagagaagaaaaagcagaagaaggcgaaacatgatcgagaagattcctcttcaactgatgacaaagagaggtggaggaaagtcgtctccccgagatgtcgttcatcatcgccccggcacattggagcccgcagagctgacagtcattcatcagccgagagaggctcgcccaggacacgcaggagacagcgccatgacactctttcttcagatgagacttctcctcgcccgctggcacggccccccactaagccaagaagccgaagtcgtgatagaggggacacacagcgaccgaggagaaggaggtcaaggtctccacgggaaaccaagcgaaggcacgacacagactcggatgattaaaggaattctgtcctgaaaaaaaaaaaaaaaaaaaaaaaaaa

SEQ ID NO: 635 - DNA, 3180 bp, Xenopus laevis
cccacgcgtccgctccgccctcgggtgacagtgcgatgacatggggtagcctcgatccggagagcggtgacccaagagcggttccttgctatggatagtgctattactttgtggcagttccttctccagctcctacaggagccacatcacaatcagcttatctgctggacatcaaatgatggagaattcaaacttctgcaagctgaagaagtggccagattatggggagtccgcaaaaataagcccagcatgaactatgacaaactaagccgagcacttcgctattactacgtgaaaaatatcattaagaaggtaaatggacagaagtttgtatacaagtttgtctcttatcctgacattcttactatggacccacttacgttgactcgtggggaaggtgagatggaatgtagtccttctgatgctgttgcctgcctgagccgggaaaaagaaaactatggcaaggagcgaactccagcccttcccataaaatcctcaggacgaaacgactacatacactctggtctttatacctcttttactcttaactccttgaatacagctggagtgaagctctttaaagctacacaagtagaacatcctggtgagaagaaaagttttcaggaatcccctttatctgtgataaaatttgtgacaacaccaaccaagaatcctgagccaccacctcaggttgtctctttcccacctccacctcctgatccccatgagaaaccagcagaatcagaaattcctgtaaaatgtacaatatcaccccttgcctcttcagtttccacagtcccagagcccacaaattcaacatcaccagcagtagaaatagaggttaatgctgaactggaatctgagacttctgaatccctggatttttctcatgatgtgtccttggaggtgacagatccagaacctgaacaggaaccctatgtactcgacataaaaagcacctcaaaatctaaaaagccaaaggggcttgagttggctcccactgtggtcatcaccaccagtgattccaaccctttgggaattcttagcccttcactagggacagcttccctgacacctgcatttttttctcagactccgattctgctgacccccagccccctgttatccagcatacacttttggagcactctgagtccaatggcccctcatagccctgccaggttacatggagcaagcacactgttccagtttccatctgtgtataacagccacatgccgttcaccttatcaagtttcgacagcccaaccacaccaggacccttttctcctgacctgcagaagtcctagcagaaaccttgtaacaacagagcaagcctagaaaattagtagagtggggtgtacttgttcaaagaaaaagttgtattatcataacatagtaaatatgaactgcaaaaaaagaagtatgacctgctggactattcatcacagagcttctatattttgttgtgcaattccattttgtatatgtttctaaattcagggacaacgtgttgctgaaaatgtaaccaaggtaatttctcgactgcaaattggatgaaaagtaaggtggaaatatgctgaaagggcaattaggagcctactgtcttattgaactgattattttcttatttcaacagattatttacttttagttaaatattataaaactccttaactgttttatgccctgtatcgaatttgtataacaggagacaaatgcagtttggaacaaatggaaacctttgaacacctcaagcataatttaaggatcaatcgaggtccattttgactcaggtggaggtaccgttcaatttgtattatttaaagagaatccaaagcacttaaacacatattaggccaaagggaaatagtggtcttaatgccatgttagctatgtttgcactaccataaaatcctgtgttctagtaatgtttctcagctagcaatgatcaaacgcttaaaatgtagccaataaacaggcatctagtcttaatggtgcagtatctccaagcccagaatcattttaatgtatgtacaaaatatgttcagtctgtatagattaaaggtaaagcatacattttggtcataagatgaaagaaaaaaaaccctttaatggcccacacaacagttacattcaatatatctctaaaatggggcaaaaacagcagaaatcatcaaaaggcttggcactaaataaatttatctgataaatggactttttttatactagtggtgttggtaagatatattgcaaaacgttaggattccttctggatgactccctgttgtataaagataatacagcagatcttgtaattacactttaactcctacgatgaagaagtaccacatggtagatgtgcctatcacgggtctttcgtaaaacaaaaatattaatgtgtttgagacaaatgcaaatgtaaaggtatatattggaaatatattttgtcccagttaaagattagtacttatttgagtgtgatttttatatgctaggcacatttgtttgaagaaaatggctttgtgcttgtggcaagataaaatttggcacatgccattatttacagcctcctacataggaccaatatgtaatatcagtcacatgtttgtttattgtgaatttattatggatgtgattgttgagtatgactgggttttaaggctgacttccattttaatgctttcctttggccagatctatatatgcgacatctctctcttgaattgagagcttggaggagcaatacatactggcaaacctgtttcgttttttggctccttcatttctgtgttaacagatctaggagcatatgtactgcagtatatgtttgagaagaattaattcatgttgtatattttagctgggtacttgaactgctgtctgtgagcattgcattcctttgttaactaactgagcagcaattgctaattacaatttttttaaatattatatgcataatacctttttttatatatttcagttagtgttttatttagctgcctgtaatgctgttagcaggggtagttgttgacctatcttttccccagaaattgaagcttgcaaagctgatccgatgcccatgtgctgtatataactcataataactttgcctgccatattggaagggtgaaacctccactccagaggaatgcttgccaaaaggtaaaaaaaaaaaaaaa

SEQ ID NO: 636 - DNA, 2267 bp, Xenopus laevis
gccagtggcaaagctaatttcaagtatatggctaaattgctcccttttttctctttgtgctacagaaaatggctcctgcagatctatggttgggggtcctgctcattcttgcctcagtgcagggaacagcatcttcttactatgatggggttgaagaactggataacaaccttattctgagctgcacaaaagaagcaaagcatctggttgatacagcttataaaaacacccgtttaatgctaaaggatcgcttgaggagaaggactgtgagtgcatctgaccttatggcatatttcaagcagccagtggctgggagcagaaatgccatcagagccgcagattatatgggcaccaccctacagctcttatcccacaagctaaagccattccaccaccgaccttttaatatcacagatttgctgacagagacccaaatagacgctatttataagctgactggctgtgcctaccaacatcttcccagcgcttgccaggagagcccctatcgcaccattacaggacagtgcaataacaggaagaaccctatcctcggtgcttctaatacaggatttacacgcctgctgccagctgtatatgaagatggcttgtctgttccacgtggatggacagaaaacttgcccatcaatggctttcctctgcctttggcacgagctgtgtcaaacgagattgttcgattccccaatgagaacctgacactggatgaagggagggctttaatcttcatgcaatggggccaatggacagatcatgacctggacctttctcctgagacacctgcaaggtcaacattcctagagggcattgactgtgacaccaactgtgccaaagagcctccttgctttcctctgaagattccaccaaatgaccctcgaattagtaatcagagtgattgtataccccttttccgctcatctccagtgtgtaccccaggatctcctgtacgggagcaaattaatatactcacctcatttattgatggaagccaggtgtatggaagtgactggccacttgctgtaaagctccgtaacaatacaaaccagttgggcttgatggccataaatcagaggtttacagataatggacttcctttcttgccctttgaaacagccgaggaagacttttgtgtgctgacaaacagatcgtctggtatcccttgcttcctgggaggagacccccgtgttagtgaacaacctggtcttactgctttccacacactttttgtgcgagctcataacaacatagcagcgcgtttacgtgaattgaacccaagatggtctggggaaacactttatcaggaagctcgcaagattattggtggaattttgcagaaaatcacatacaaagactggttgcctcttctgcttggctcagagatggctgctgttcttcctgcttatagatcctataatgagtctgtggatccaagagtgtccaatgtttttaccgttgtcttccggatgggacacactttaatacagccatttatctaccgactagctgatggctatcgtcccttgggaccagaacctcaaattcctctacacaagactttctttaacagctggagggtggtgagagaaggtgggattgatcccctgctccgtggccttatggcaaatcgagccaaactaaatcgtcagaaccaattggtggttgatgagctgagagaacgtcttttcgtacttttcaaacgcattggtcttgacctcacagctattaatatgcaaagaggccgggaacatgggctgccaggatacaatgcatggagacggttttgtggcctatctgctcccagtaatgtgaatgagttggctgcagtgctcaataacaggaatttggctgagaaattcattaaactatatggaagcccagaaaatatcgatatttgggttggaggtgttgcagagtctctggtgcgcaatggacgcattgggaagttgctgacatgtcttattgggaaccagttccgcagggctcgagatggagaccggttttactatgagcagccttcagtgtttaccaacgagcagagggcttcaatagaaagagtaaccttggccagagtcatctgtgataacaccaagattactgaggtgccccgtaacgtatttctggggaaccgatacccaagagattttgtggcatgttctagaatccccacactggatttaaatccttggaaagtggcttaaccataagaagggaaccaggaaatagctctgctgatgccttgaatcctttggctg

SEQ ID NO: 637 - DNA, 2267 bp, Xenopus laevis
gccagtggcaaagctaatttcaagtatatggctaaattgctcccttttttctctttgtgctacagaacatggctcctgcagatctatggttgggggtcctgctcattcttgcctcagtgcagggaacagcatcttcttactatgatggggttgaagaactggataacaaccttattctgagctgcacaaaagaagcaaagcatctggttgatacagcttataaaaacacccgtttaatgctaaaggatcgcttgaggagaaggactgtgagtgcatctgaccttatggcatatttcaagcagccagtggctgggagcagaaatgccatcagagccgcagattatatgggcaccaccctacagctcttatcccacaagctaaagccattccaccaccgaccttttaatatcacagatttgctgacagagacccaaatagacgctatttataagctgactggctgtgcctaccaacatcttcccagcgcttgccaggagagcccctatcgcaccattacaggacagtgcaataacaggaagaaccctatcctcggtgcttctaatacaggatttacacgcctgctgccagctgtatatgaagatggcttgtctgttccacgtggatggacagaaaacttgcccatcaatggctttcctctgcctttggcacgagctgtgtcaaacgagattgttcgattccccaatgagaacctgacactggatgaagggagggctttaatcttcatgcaatggggccaatggacagatcatgacctggacctttctcctgagacacctgcaaggtcaacattcctagagggcattgactgtgacaccaactgtgccaaagagcctccttgctttcctctgaagattccaccaaatgaccctcgaattagtaatcagagtgattgtataccccttttccgctcatctccagtgtgtaccccaggatctcctgtacgggagcaaattaatatactcacctcatttattgatggaagccaggtgtatggaagtgactggccacttgctgtaaagctccgtaacaatacaaaccagttgggcttgatggccataaatcagaggtttacagataatggacttcctttcttgccctttgaaacagccgaggaagacttttgtgtgctgacaaacagatcgtctggtatcccttgcttcctgggaggagacccccgtgttagtgaacaacctggtcttactgctttccacacactttttgtgcgagctcataacaacatagcagcgcgtttacgtgaattgaacccaagatggtctggggaaacactttatcaggaagctcgcaagattattggtggaattttgcagaaaatcacatacaaagactggttgcctcttctgcttggctcagagatggctgctgttcttcctgcttatagatcctataatgagtctgtggatccaagagtgtccaatgtttttaccgttgtcttccggatgggacacactttaatacagccatttatctaccgactagctgatggctatcgtcccttgggaccagaacctcaaattcctctacacaagactttctttaacagctggagggtggtgagagaaggtgggattgatcccctgctccgtggccttatggcaaatcgagccaaactaaatcgtcagaaccaattggtggttgatgagctgagagaacgtcttttcgtacttttcaaacgcattggtcttgacctcacagctattaatatgcaaagaggccgggaacatgggctgccaggatacaatgcatggagacggttttgtggcctatctgctcccagtaatgtgaatgagttggctgcagtgctcaataacaggaatttggctgagaaattcattaaactatatggaagcccagaaaatatcgatatttgggttggaggtgttgcagagtctctggtgcgcaatggacgcattgggaagttgctgacatgtcttattgggaaccagttccgcagggctcgagatggagaccggttttactatgagcagccttcagtgtttaccaacgagcagagggcttcaatagaaagagtaaccttggccagagtcatctgtgataacaccaagattactgaggtgccccgtaacgtatttctggggaaccgatacccaagagattttgtggcatgttctagaatccccacactggatttaaatccttggaaagtggcttaaccataagaagggaaccaggaaatagctctgctgatgccttgaatcctttggctg

SEQ ID NO: 638 - DNA, 1304 bp, Xenopus laevis
cctgcggggttctagaggtgacgagcgggtgctggatgcgtccggtgggaggagagccagcaggcccgtcatatcgcttcccagagatgctgatcgatgtgtaacccagaagtaacggactgatttctcatcgcaggtcttaaacttattggtggggggcgtttgtccagaatttagaggacccgtccgccccccaccatgggcaacgcggctaccacaaagaagggtggcgagattgaaagtgtgaaagaatttctggcaaaagcaaaagaagattttctgaaaaaatgggagagtccagcacagaacacagcaaatctggaccagtttgagcgaatgaaaactcttggcaccgggtcgtttgggcgcgtaatgctggtcaggcacaaagaaaatggcagtcactttgctatgaaaatcttggacaagcagaaggtggtgaagttgaagcagattgagcacacgttgaatgagaaacggatactgcaggctgtgaatttcccattccttgtgcggctggagtattcgtttaaggataacaccaatctgtatatggtcatggagtatgtagccggcggggagatgttctctcatttgcgcagaatcgggcgcttcagtgaacctcatgcacgcttctatgcatcccagattgtattaactttcgaatatctacacgccctggatcttatatacagagacttgaagccagagaatcttctcatagaccagcaggggtatatccaggtgacagattttggatttgcaaagagagtgaaagggaggacctggaccctgtgtgggacaccagaataccttgcgccagaaataatccttagcaagggttataataaggcagtggattggtgggccctaggagtcctgatttatgagatggctgctgggtatcctccatttttcgctgatcagcccattcagatctatgaaaaaatagtatcggggaaggtccggttcccctctcactttagctccgacctgaaggatcttctcagaaatcttttgcaagttgatctgactaagcgttttgggaatttgaagaacggtgtcacagacatcaagggacacaaatggttcagtacaacggactggattgcagtctaccagaaaaaggtggaagctcccttcatccctaaatgtaagggtcctggagacaccagtaattttgacgactatgaagaagaagaaatcagagtttcaatcactgaaaaatgcgctaaagaattctctgacttttaatttgcacccgtaaaggcggagcagtcaccaaacacgcccatcaagcaaga

SEQ ID NO: 639 - DNA, 3137 bp, Xenopus laevis
attccgattgcattgaaattcaatttggcattaagttttaattaccccagtctgaccaggagcctgcgccatggccttcccactgaaagatgatttagggagagccaaagattgctggggctgcccatccgacaccccagccctttctacctgcagcaatgctgatattttcagacgaataaacgccatgctggacaactctctggatttcactggtgtttgcaccaccccaaacacaaagggcaaatgtgaacaccttcaagactaccaagatacagagggacctgcagctagcagaatgctgttttccacttcacatgaacctcttcctcgcggccttccagataccaatgacttgtgccttggtcttcagtctctcagtcttacagggtgggacagaccctggagcactcaggactcagaagctggtggacattcaagtactccaacagctgctcagtctgtctttagcatgctgaacagccccatggggaagccaagccccttgggctttctgacatttgatccaattggttcagacctcatggagaagtatcctactcctttgctgcgtagctctcgattggacagccgctctattttggattctcgctccagcagcccttctgactctgacactagtggattcagctctggatcagaccacctttcagacctaatttcaagtcttcgcatctctcctccgctgcatttcctcccacttggagggggagtgtcacgggacccgttgaagctaggtattggctcaaggctagaccaggaccatgcagccttggcggcagcaactgtctctccacttggcataacaaagggatggcccagtacttcagtctggccttcctgggatctgctggattctgcagaggacccatttagcattgagcgagaggcacgcctacacagacaggctgcagctgtgaatgaagcaacctgcacctggagtgggcagctgccccctagaaactacaaaaatcctgtgtattcctgcaaagtctttctcggtggtgtcccctgggacataacagaaactggacttatcaacacgttccgtgtatttggagcacttagtgttgagtggcctggtaaggatggcaagcatccccgctgccctcccaaaggtaatatgcccaaaggttatgtttatctggtatttgaatcagagaagtcagttcgtgctttgcttcaggcgtgctctcaggacctactaagccaagatgggctgagtgaacactacttcaaaatgtccagtcgcaggatggcctgcaaggaggtgcaggtcattccttgggtgcttgcagacagcaactttgtgcgtagtccatcacaacggctggatcccagtaagactgtatttgtgggagctctacatggcatgctaaatgctgaagctttggcttcgatcatgaatgatctgtttggtggcgtagtctatgctggcattgatactgataagcacaaatatccaatcgggtccggtcgtgtgaccttcaataaccagcgcagttacctgaaagctgtgagtgctgcttttgtggaaataaaaactgccaagtttacaaaaaaggttcaaattgatccgtatttggaagactctgtttgccaggtgtgcaatgctcagcctgggccattcttctgcagagaccaggtttgctttaagtatttctgccgttcctgttggcactggcagcactctatggaaatcctgcgccaccaccgccctctcatgcgtaatcagaaaagtcgtgactccagctaaagacattggaacaacattggtccaaaaatctgacacaactggatatgttgggctaacaagagtgttcagaattttctccctctagcactggaagcactagttttttttttttttattccagggatagatcagcaatcagtggattgtggggagaatgtcactatttttttgcacttgctgtaccttgtggtagttttctcacactagtgcacacttgagatttgccaggttttttgcttttcttttaaaaaaaaaaaattgagaggatatttccttctcaggacttaattgcagttcccagactgggcctaaacaacaattgctgaaagtaagcaatgttcatggccttgttttcttaaggtttatggctaatgatgcctctgcttttggttaactttttttttttttttattacaggcacttcttttacattccttgcaatattgctggtgatgatgcaaattacattaatcttcccatgttttgctgttgccatacagtgccttccaatttatttgatgtcccatctgaactacataaactagtttagctgacatttttactgtaacaacaatagcagaatttgctctttaaaccaaatcatatttcatatttttacccctgtggatttttaccagttcctttttacactcttaaagacgttttttaagtccattatattttgttttcttttcctggcagcttttaacattattgcaaagttcagtttctgggagctgctggttaagaaaataaacctacataaattccttgtacaacagagtttataaccaaaaggacagacttaaggccttgactgaaccagattatgacagtgtgtgtgtatagttttaaggaaatttgttgcacttttttaatttgcacttaaggggatggtagagtttttaatcactttctgtttgtatttggctggacaaaaaagggctgtgatatgtcttgagaatggggtagaggcaagagatggcacaacacctttctcctggagggaataagtgcccatgctctgtttttcttctttttttttgtggaaataactgacttatgcaaactgttgcaggcctttacaattttgtgtccttaatttttatttatagccccccttaaaattgtaagctctgtgccaaagaccccagttttctgtattccctcttatccagaacatgctgagctaattctacttcctagctgccctaagcagggtatatctgtgaagctgtgtgtaaagtctctacctcattgtagttatgcaagcagaagatgcacttaatctatggatgtggtgtagttttgtttgtttttctttgttttttttggcacaaaataaacacgttgaagcaga

SEQ ID NO: 640 - DNA, 1818 bp, Xenopus laevis; identical to SEQ ID NO: 5

SEQ ID NO: 641 - DNA, 1595 bp, Xenopus laevis
cgggagccccctaagtcggtgcacaatagtcgggccggagggggtgagggctgagcaccatgttgcactgcgcgggaccccacaccggtaaacttgtgaaacaggtggccgcctgctgcctgctgctgccccgcttcctgctcacggcgctgatgctgtggctgctggatttccagtgtatcaggaggagggtcctgctgaccgccagggaggagagcaccgccgagcacgaagaccccccgctgtgcgtgtccgactccaaccgaatgtgcaccgtggagtcgctgcgagccgtgtggcacgggcagaagctggactacttcaagtcggcgcacctgggctgctcggcgcccaacacggaggtggtgatgctggaagggcgcaggctgtgcaagatcctggacttctcccagggcaagagaccgctggttgtcaatttcggcagctgcacctgacccccgttcatggctcgcctgcaagcctatcgccgcctggcagcccagcacgttggcatcgcggatttcctgctggtgtacatagaagaagcgcacccgtcagacggctggctcagcaccgacgcctcctaccaaatcccccagcaccagtgcctgcaggaccgcctggccgcggctcagctcatgctccaaggggcgcccggctgccgggtggtggtggacaccatggacaactcctccaacgccgcctacggtgcctactttgagagactttacatcgtcctggagggcaaagtggtgtaccaggggggtcgggggccggagggctacaagatctctgaactgaggatgtggctggagcagtaccagcagggcttgatggggaccaagggcagcggccaagtggtcattcaagtgtaattgtcatcagcagcagcagcaccgaggcaacgggacacaataaccaccaccagcagcagcagcagcagtattattactattgttattattattgtcattattatagaggcaggtggaacctgttaggtgaagtgactgaaagtgcacaaaaagtgcgaccaaacgactcctttctataaatcccagtgcgacaaatagtagtaaactgcaacaaggcaaaggcatcccatctgcgcacctcgggctcaatcgcaacttccaacacgttcagtccccccgactcatcagggagttgccattgaacaaatgccggagggtcgcggctcagatgtcattgcgagaataataagctacagtggctgtctgtctgtccccagctgtgtgtgcgactaagccgctgtgtgaagtggggcgggagtacaaggtgcgtgtgactggagccacccactccgactctgcaggtgtttgcaaatgacgaccgattttgaaatggtctcacggccaaaaactcgtgtccgacatcaacccccttcctcaaactacctgcaggctccggtgtcgggctcctccagtccagtagatttatttatgtgatttttgtaagcagacttttatataaaggattttttacgattaaaaacatgaccacataaaggcgactgtctgtgtgttgcactgattgccctgatcaaaaaaaaaaaaaaaaaaaaaaaaaaaaaa

SEQ ID NO: 642 - DNA, 2192 bp, Xenopus laevis
gagtagctgtgaggcgctgtgaggtgcggatcatggctgtggtgtttgtgcttcttttcccgctgctcttcctgtttcctcgctccggagccaacaggcactcggtctactggaacagctccaactaccacctgcggcgggacggctacacggtgcaggtggatgtgaacgattacctggatatctattgcccccactacaatgagtcggtggtggagcacaagatggagcagtacatcctctatatggtgagctacgagggctaccggacctgcaacatcagccagggcttcaagcgctgggagtgtaaccgcccccacgtcccccacagtccaatcaaattctccgagaagttccagcggtacagcgccttctccttgggctacgagttccacgccggccacgagtactactatatctcgacaccgacgcacaatcacaggcgctcctgtctgaagatgaaagtgtttgtgtgctgcgccagcacctcccactccggagagaaacattccccgaccctgccccagttcacgataggcccagaggtcaacatagaggatttagataacttcaacccggagatcccaaagttggagaagagcgtcagcgggagcagtcccaaaaggaagcacttacacttaacagttgcagtttgtctccttataatgacgctcctggcttcctagctctctctccatggcactgacgttggaagccttgttagcagaatccaaaccaaacaggttgggacagagctagaggcaggggtctggcattaggcgaccccctctcccttctctgtgtttcttcgcttcctttgcagagacgtaaaggaaactgtggacattgtgaaggtcccgggctggtggctgaggacacgtcagctcctgtgtgaccttgtgccaagcaatgttggtggggccaggagaccgtttctcaggagccctacagacatttaaacttgtgcgcggcctccaagaacaacatggctgcccaaatgttccgccctctgtcggtgggctctgtaactcgagtgcctacacccccttggctcctgcaaggacaataataccctcgggatatggcagagccttggactggaccatcacatttattggccttatcacccctgagtaccccctgcctctctcattcttacatacagcttggatggctcctcccacactgaaacctgtgagacccctcccacccggaaccagcagagacccagctttaacccaacactgtctgctctactggtgccattttgtacactctttgtactgaactcaacattacaagctgtggcccctcctatttaccaagatccctaccccctcccctgggagacacagatctgttcagccctcgtctgattggtccgaggcttattcctagagcaatagcccagttatacccattggattggatacattacccagaagcctcagccaatggaacgggtctatagactgaaccatgtggaactgggtgaccaactgtgcaatgaccattcaccattatgtgccacgtgcaacgtgtgtttcttctctgccccactgcattctgggatacacgtggcgcttaaaggggccaacagcaatgaagactcctcccctgttgccccaaaacccttacgctgaaactggcgcctcactgctgtgctgcaccctccatgatacacggttgtgtctgtgcccccccccgtgctgcactactggggccccatgtttgcatgtactcagctcctgccagtgggagtgtcactcaggcgagtggggttatgggcacagcagcactcccatgcaatactgatcatgtgacactggaggggacgtgggttctactggcgccacccacttagctggcccaaatgttttccacccttataggttccattgaaaagtaaaagctccgccctttaatattggagcctgccccttggcctggtggcaggtgtttgtatctgtctataaatataaatatatatatatatattggtatataagtctatatagggccccggctgcacccgtgtatagtgacttgtatatagactgacagtggctcctcctcttcctcatgtcttccatgaaggcgcctcctcactatgcaatgcacagacactttccaataaagaccagacagacgtttttattctgaaaaaaaaaaaaaaaaaaaaaaaaaaaaaa

SEQ ID NO: 643 - DNA, 1258 bp, Xenopus laevis
aagagcggatccttgctatggatagtgctatcactttgtggcagttccttctccagctcttacaggagccacatcacagccagcttatctgctggacatcgaatgatggagaattcaaacttctgcaagccgaggaagtggccagattatggggagtccgcaaaaataagcccagcatgaactatgacaaactaagccgagcacttcgctattactacgtgaaaaatatcattaagaaggtaaatggacagaagtttgtatataagtttgtctcttatcctgacattctcactatggacccacttactttggctcgtggggaaggtgagatggaatgtcgaccgtctgatgctgttgcctgcctgagctgggaaaaaaagaactatgacaaggagcaagctccagcccctcccacgaaatcctctggacgtaatgactacatacactctggtctttatacctcttttactcttaactccttgaatacagctggagtgaaactgtttaaaactgtacaagtggaaaatcctggtgagaagaaaagtgttcaggaatccccattatctgtgataaaatttgtgacaatgccaaacaagaatcctgagccaccacctcaggttcactctctccctcccccacctcctgactctcatgagaagccaagagagtctccaccagaaattcctgtaaaatctacaatatcacccctggcctcttcagtttccacagtctctgagcccacagatacaacatcaacagccatagaaatcgaggttgatgctgaactggaaactgagagctctcagtccttggatttttctcatgatgtttccatggaggtgacagatccagaacctgaaccggtttatgtactcgacataaaaaacacatcaaagtctaaaaagccaaaggggcttgagttggctcccactgtggtcatcaccactagtgattccaaccctctgggaatccttagcccttcactagggacagcttctctaacacctgcatttttttctcagactcctattctactgactcctagccccttgttatccagcatacacttctggagcactctgagtccaatggccccgcatagccctgccaggttacatggagcaagcactctgttccagtttccgtctgtgtataacagccacatgccgttcaccttatcaagtttcgacagtccaaccacaccgggacccttttctccagacctgcagaagtcctagcagaaaccttgtaacatcag

SEQ ID NO: 644 - DNA, 4455 bp, Xenopus laevis
tcatgcgcgccgcgtaccgggccccccctccccccccggcagcgcgtgagtttggaagaggggagtatagtgagatggaggaatgagaacttgacaccccccagcatttcagcctttgcgcctccagtgagcgcgttactactgtgagattgggataaccttgcgcctatggacatgtactccgctcactgacatgtctgcctccgctctctgcctcctgaggaccttaaccctgcccggcagcagcagcggacatgggagatacgtgccaaataaggagctaatgctgcgctttctctctggaacaccctgaccaattgcaactggatttccttccccccttttatccttcattttattccgtctcgtactcggggagcctgtgaatactgtgtttgccttctgccatggaactaaatgtgctgcttctgctcctgtgcctcagtgggggccaagttggagctgtggaagagacccttatggacactcgaacggccactgctgaactgggatggacggccaatccttcttctgggtgggaagaggtgagtggctatgatgaaaacctcaacacaatccgtacataccaagtgtgcaatgtcttcggtcctaagcaaaacaactggctcctcactaccttcatcccaaggcgtggggcccatcgtgtctatgtggagatgcgttttactgttcgggactgtagcagcctcccaaatgtcccaggttcttgtaaagaaacatttaatttgtactactatgagacagactcaaatattgaaaacaagatatctacattttggaacgagtctccctacttaaaggtggacactatagctgctgatgagagtttctctcaagtggactttggtgggagactgatgaaagtcaacacagaagttcgtagttttggccctctaacccgcagtggcttctacttggcatttcaggattatggagcatgtatgtctctcctctcagttagggtcttcttcaaggaaatgcccagtgtggttcagaatttgctggtcttccctgaaaccatgactggcgcagagagtacctctttagttatagcccggggaacctgcatacctaatgctgaggaggtagatgttcctatcaaactgtactgcaatggagatggtgaatggatggttccaattgggaaatgcacctgcaaggctggatatgagcctgaaaatcatgttgtctgtaaagcctgcccagctgccatgtttaaagcaaatcaaggcatggggatatgtgcacaatgtcccgctaacagtcgttccacatctgaggcttctcccatctgcatctgtcgcaatggatactatcgagctgactttgatacacctgaggccccatgcaccagtgttccctctggtccacgcaatgtgatctccatagtcaatgagacagccatcactttagagtggcaccctccacgggaaacaggaggaagagacgatgtcgactacaacattgtctgcaagaagtgccgggcagaccggcgtgcctgctcccgctgcgacgacaacgtcgactttgttccacggcagttgggtttgactgatacccgagtctttatcagcaatttgtgggctcacactccttacacttttgaaacccaggcagtcaatggagtgacaaacaaaagtccttttccaccccagcatgtatctgttaatatcactaccaaccaagcagctccttcttctgttcccataatgcaccaagtcaaggccaccatgaaaagcatcacattatcttggcctcagcaggagcaacccaatggaatcatcttggattatgagattcgatactatgaaaaggatcatcatgaatttaactcttctctagccagaagccaaaccaacacagctagaagaaccggaggccgggtgtggatgtttatgtcggtgcaggtccgagcacgcacagtggccggctatggaaaatttagcagcaaatgtggctttcagacactaacggcggaggattacaagtcagagctgagggagcaacttcctctcacgggctcagctgctgcaggagtggtcttcattgtgtctctggtggccatctccatagtttgcagcaggaaaagaacttacagcaaggaagccgtttacagcgacaaactgcaacactacagcactggcagaggctccccaggaatgaagatttatattgatcctttcacttatgaggaccccaatgaagccgtaagagagtttgccaaggagattgatgtctcatttgtgaagattgaggaagtgattggagctggagaatttggggaagtctacaaagggcgcctgaaactccctagcaagagggaaatcagtgtggctatcaaaaccctcaaggccgggtactcagaaaagcagagacgagacttcctgagcgaggcaagcatcatgggtcagtttgatcaccccaatatcattcgcctggaaggtgtggtgaccaaaagcaggcctgttatgattatcacagaattcatggagaatggagccctggattcttttctacggcaaaacgatgggcagtttactgtgattcagctggtgggaatgcttcgaggaatcgcagctggcatgaagtacctttctgaaatgaactatgttcaccgagacctggcggcaagaaatatcttggtgaatagcaacttggtctgtaaagtgtccgattttggcttatcccggtatctgcaggatgacacgtcagatcccacatacaccagttccctgggtggtaagatcccagtcagatggacagctcaggaagccattgcttaccgcaagttcacttcagctagcgatgtatggagttatgggatcgtcatgtgggaagtgatgtcctatggggaacggccatattggacaatgtccaaccaggatgtcataaatgccatcgagcaggattatcgccttcctccacccatggactgtccggctgcccttcaccaacttatgctggactgctggcagaaagatcgcaacagccgtccacgcttagccgagattgtcaacaccttaagaccaatgatccggaaccctgccagtctgaagacagtggctactatccccgctgtgccttcccagccgctgctcgaccgctccatcccagacatttcagcctttacctcagtagacgactggttgagtgctatcaagatgggacaatacagagacaacttcctgagctccggtttcacctccctacagcttgtcgctcagatgacctcagaggatctcctcaggatagggataacgttagcagggcaccagaaaaaaatcctgaactctattcaatccatgagggtccaaataacgcagtctcccacctctatagcatgagactttgggacattgagggtcagggagtacacaagggtgggtaggggaaatgtagtggtcaaaaggaggaatggattatcagtggggaaacagaactttgtaattcaggtgacaacattttatcaagcatggaactccatcaaaggtcaggatacacaagggtgggtagggaaatgtagtggtcaaaaggaggaatggattatgcagtggggaaacagaactttgtaattcaggtgacaacattttatcaagcatggaactcccatcaaaagcataaggcccttgcattgagggtcttctgtttcggttgctcactatgtaatgtggtgtcatcagacgaaaatctaattttttggaaaagttgtgggaaatgactggaaaagtctaagcattatagttggagacactgtctggaaataaaggtgcttacttttaccgtactaccaattgcaaagggattatggaccaaatgttccatcagcttcatctgttgcgtggatgcctgtgtccctcatttccgacacaactgctgcttcagggaaagaggcgtatgcacacttccatctactcttttatttgttttgtcttcatattgaagataaagttgtatggaagaacaaactttttgttttcttcttcttttgcttgcattttttggcaaaaaaagaaaaatatatgaaaaaaaacccattaaaaaccgatcaggaggaaaacctgatgatgtgtctacctttatgtcctatatgttaaaaataaaaaaaatgagctgaaaggtaccttatggagctatactggatcattaactttgtcttggaaactcaattacaaaaaaggtggcgctagggataagagggacaactgctattgctggtacatgtggattatggagcgtactatatgacatagacatcactgggcttgtttgggttcctttatggtcatcttcatgaaatttagtactgaatttggcagcaccttcttttggattaaaaggtaagatgtagactatgtacagttttagttccaccttgcaaacgcctctgtcttactgagtaacatatggagaagtcaataaaacctactttgatgt

SEQ ID NO: 645 - DNA, 2115 bp, Xenopus laevis
cgcgaaacgggaccccgtccggcctaatggtggctttggggcactgtcagaaacgaggcctgggtgggggccggaagacccgccttatctgccgcccgtaaccaaggcagcatgtgcggacgcaacatggaggagctggccgtggaggtgcggggctccaatggagctttctacaaggcgtttatgaaagatgtacatgaggattctataactgtcactttcgaaaacaactggcagcaagagagacaaattccgttccatgatgtaagatttccacctccatcagggtataataaggatataaacgaaagagatgaggtagaggtgtattccagagcgaatgaaaaagagccatgctgctggtggcttgctaaagttagaatgataaagggtgagttttacgttatagaatatgcagcttgtgatgcaacttacaatgagatagtcactatagaacggctgcgatctgttaatcccaacaagccagcaacaaaaagctcatttcataaggttaaactggacgttccagaagatttaaggcaaatgtgtgcaaaagattccgcacataaagattttaaaaaggctgtcggtgcattttcagtatcgtatgattccgaaaactaccagcttgtcattctgtctgttaatgaagtgagtataaaaagggcaagcatgctgagtgacatgcatttccgaagccttcgtaccaaactgtcgcttatgttgagaaatgaagaagccagcaaacagcttgagagctctaggcagttggcctccagatttcacgagcagttcattgtacgagaagatctgatggggcttgccattggtactcatggtgccaacatacaacaggctaggaaggttcctggggtgactgcaattgatcttgatgaagacacgtgcacttttcatatttatggagaggaccaagaagctgttaagaaagcgaggacctacctggaatttgcagaaaatgttatacaagttccacgaaacttagtaggcaaagtcattgggaaaaatggaaagctcattcaagaaattgtggataaatctggcgttgtccgagtccgaattgaagcagaaaacgataagaacatttcccaggaagaggggatagttccttttgtatttgtgggaacaaaggacagcatcaccaatgcaactgttcttttggattaccaccttaactacttaaaggaagtggaccaactgcgcttggaaaggttacaaattgatgagcaacttcgacacattggagcgagctcaagacctccgccgaatcggcctgataaggagaagggatatttgagtgaagactgtagtggcactgtgagaggaagccgaccttatagtaatcgaggccgcagtagaaggggcacaggttatgcctctggtacaaattccgaagcttcaaatgcctctgagacggaatcagaccaccgagatgaacttagtgattggtcattggctccagctgaggatgacagagataattatcaccgaagaggggatggacgcagacgagggggaacacgagggcaaggcatgagagggcgtggaggatttaaaggaaatgatgaccaaccacgaccagacaacagacaacgtaattcaagagagacaaaagcaaggacatcagatggctcattacagatccgccttgactgcaataatgaaaggagtgtacatactaaaaccctgcaaaatgcatctgttgacggcagccgactgcgcactggcaaagatcgcgttcaaaagaaagagaagactgacggagtggatggaccacaagtggtggttaatggcgtaccataaaccctctatgttgcaaataaaccctacatagtgcaaacaaaatacactcattccacaatagagaaacctgtttggccaaagacaaatgggcaagacaatgcagggcctacatgaattgttcctgttagcctgattttgttaatgttggctgtaagcagttttcagaattcagacatttgaaaacatatttgcattcaatatcaaaactttgaggctttcaagtacatattgcacttgacttaaaaacttaaaaaaagtattttttgtttaaaagaaaagaaaaaaaaataaatg

SEQ ID NO: 646 - DNA, 2648 bp, Xenopus laevis
  modified_base (2564)..(2564): a, c, t, g, unknown or other
  modified_base (2589)..(2589): a, c, t, g, unknown or other
atggaggacatgacggtggaagtgcgcggctctaacggagcattttacaagggatttgtcaaggatgtgcatgaagattccctcacagttgtttttgaaaacaactggcaaccagagcgtcaggtgcctttcgatgaagtccggatgcctcctctccctgatattaaaaaggaaattactgaaggagatgaggttgaggtgtattcccgagctaatgaccaagaaccttgtgggtggtggttagcaaaagtacgaatgatgaaaggagagttttatgttattgaatatgctgcttgtgatgctacctacaatgaaattgtaacatttgaacgtctgcgacctgtaaaccagaataaaaccgtaactaagaactccttcttcaaatgtacagtggatgtccctgaagatttaagagaatcgtgttctaatgaaaatgtgcataaggaattcaagaaagctgtaggagcctgccgagtttattttcatgcagaaactaatcagctgataatactgtctgcatgcgaatcaactgtaaagagagtaaacatactgagcgacatgcatttgcgaagtatccgcaccaaactgatgcttatgtccagaaatgaagaggctacaaaacatttagaatgtacaaaacagcttgcatcagcatttcatgaagaatttattgttcgggaagatttaatgggcctggcaatagggacacatggaagtaatatccaacaggcaagaaaggttccaggtattactgctattgagttagatgaagatagcggcacatttcgaatttatggggagagtgcagaagctgttaaaaaagccagaagttacttagagtttgtggaagatttcattcaagtacctagaaatcttgtgggaaaagtaattggcaaaaatggaaaagtcattcaagaaattgttgataaatctggagtagttagagtcagaattgagggagacaacgaaacaaagttacctcgtgaagatggtatggttccctttgtttttgttggaaccaaagagaacattggtaatgtacaggttcttctggaataccacattgcatatttgaaggaggtagagcaacttcgaatggaaagactacagatagatgagcaacttcgtcagattggtatgggcttcagaccttcttctagcagaggaacagagaaagagaaaggatatgcaactgatgaaagcactgcttcatctgtacgaggaagcaggtcttacagtggcagaggcagaggtcgcaggggcccaaattatacatctggttatggtacaaattctgagctttccaatccttctgagactgaatcagaaagaaaagaggaactgagtgactggtcacttgctggcgaagatgagcgtgaaagccgccaacagcgtgacagtcgaaggcgccctgggggtagaggaaggagtggatctgctggtcgaggtcggggaggatcaaggggtggaaagtcttctatcagttctgtgcttaaggatccagacagcaacccatacagcttacttgacaacacagaatctgaccagaccgctgacacagatgcaagtgagtctcaccacaacacaaaccgtcgaaggagatctcggaggaggaggactgatgaggattcctcactaatggacggaatgactgagtctgacaatgcatctgttaatgaaaatggcttggatgatagtgagcaaaaaccccagcgacgcaatcgtagccgcaggcgtcgcttcaggggtcaggcagaagatagacagccagttacagttgctgactatatctctagagcagaatctcaaagccggcagcgaaatctacctaaagaaactttggcaaaaggcaaaaaagaaaaggtgaaggatgtaattgaagagcacggaccttcggaaaaagtcattaatggcccaagagcttcttctgccgacaaggcttcaaatccacagaccgcatccacagaaagaaaccaagcaagctgtcaagatggaagtaaacaagaagccataatgaatggggtgtcttaatagaaaatgttgttttgttttcaaaatatggcattgatggggggggggatcctgcataatattcattctaaaagcattagctgcttttgttacatttttaatatgcaaccacttcttcacctgaggaaaactagaaaaatgcagtctaaagtattttgcacgaaatgtaatttctccattggttcagtctggaaaatggtaatttttaacttttttttctcctccccattgaaaaaaagtttgtggaaggaagctgcagatcactggaaaaacagaataaaaaaactgcagagaaactggcagtgactgttctacattggagctttgtttggtttatttattaaactgtacagtatttaaaatcaaacatagctataaacactaaactgaacatagtcatgtccacaaaggcatagtccacaaagacataatcctaactactgaaaagatcaatttccagaatgtttctcctgtaaaaactgcatatgttagtcattagtatggtatttttatttttgttttggttggttgangtgcaatatgttttttttgtatgcnggtagtaaagaaaaaccaaaaaataaaaactttgatcttccaaaaaaaaaaaaaaaaaa

SEQ ID NO: 647 - DNA, 639 bp, Xenopus laevis
atgcctggctacgtcctcacctatttccccgtcagaggaagggctgaacctatccggctgctgttggcagatcagggcatttcctggaaagaggatgaagtgcagattccagactggttttcaggaaaagatgccagaaagaaagaggcggtattcggtcagctgcctcagtttcaggatggagactatgtcctttatcagagtaacagtattctaaggtatctgggtaataaacatggactgactggagccaatgatgaggaacgtggtcacatagacatggtgaacgatggcgtggaagatctgagacagaaatatgggcggcttatcttttttgaatatgagacaggtaaagataaatatctcaaggaacttcccagtcagttggatttcttcgagaggatcctttctaaaaatgctaatggatctaaatttgttgtgggacagaagatttcctttgctgattataacctcctggatatccttcagtgtcaccttgatttgtgttcaaagtccctttcagcctaccctttgctcactgcctatgttgaaagacttgttgcccggccaaaaatcagcgaatacttaaaatcagatgcccgcaataaacggcctatcacccccaaacacaaaaagtga

SEQ ID NO: 648 - DNA, 4012 bp, Xenopus laevis
gggaagagaagtgcacttgtttgtgtctagtgccccccacaatggcctctccacaggatcctacagcagtgcccccccgggggctgaccggtgcctcccgctctcctgtgacccccgcatgcagcatggggaagcccaggaagaaaggtgcatccccccaaggcccccagtccctgcaggaagtaaagaagaggggccacaggatgaagcgcagccctgaccagcagctgtgtgaccaactcgaggggctgaatttgttggcagaggcagccgtgcaaggaacgggactggtttatgatgagcagatggcacacaactactgtttatgggatgaaaactttcctgaatgcccaggccgtatctgggctgtgagagacaagatggctgaatacggcctggcagagcgatgtgtggcggtgccggctcgtgaagcatcagaggaggaaatcttgctcattcacagcccccagtatgtggcactgatgagatccactcagaaaatgaccatggatgagcttagagctctgtctgaccgctatgattcggtgtacttgcacccgacgtctttcacttgcgcctctttggccgtgggctcagtgctccagctggtggatagagttcagcatggggagatccgcaatggattggctgttgtcaggcctcctggacatcacgcacacactgaccagatgaacggttactgcatgtttaaccagcttgctattgctgcccgatacgcccaactgacatatggtgccaaacgggtcctaattgtagactgggacgtgcatcacggtcagggcacacagttcatatttgagagtgatcccagtgtcctgtacttttctgtccatcgctatgacaacgggggtttttggccccatctaaaagaatcggccagttcagctgtggggaaggaacgaggagagcgattcaatgtgaatgtggcctggaacaagaccagaatgagtgatgctgattatatccacgtgttccttaatgtcctacttcctgtcgcctacgagttccagcctcaccttgtgttggtagcagctgggtttgactctgtggttggagaccctaagggagagatgtcggccaccccagcgtgtttctctcacctcactcacctgctgatgtcactggcacagggcagactcattctttcactagagggtgggtacaatcagcgctcattggcagaaggagcctgtgcatctctgaaagccttactgggtgacccgtgcccaagactgaccctgccatctgcaccctgtcaaagtgccctggattcaatgtctgacacaataagtgcccattgcagcttatggaagatgctgcaggattacgagagtgaaggagagcccattattgaaccccagagtgctaaagatggcccccctgaggggacagatgagcctcctctggagaaatttctagaacaggcaatgatcgaagtgatgcggaaagtgccagagcagcgaacagcgctggtgtatgatgagcaaatgatggagcatcgcaatatgtgggactgttatcacccagagtctccacagaggataaaccagatatttaagcggcacaaggatctggggctgttagaacgttgcagtcgccttccatcacgcttggccactcagaaggagctacagatgtgccacagtctctcctacatccagaagattgaggcatctgctcacatgaaaccacgagacctgcacaggctgggggatgagtacaactccatttatatcaattccaaatcctaccacagtgcccggctggcagctggctctaccttcaatgtagtggaggccgtggttacaggaaaggcacaaaatggaattggcattgttcgccctccgggtcatcatgcagaaccaggggaagcctgtggtttctgtttctttaacaccgtggcactagctgcccgctatgcacagagactgcagagccaatcagaggatccactcagagtaatgattttggattgggatgtacaccatggcaatggcacgcagcacatcttccaggaggatgccagtgtgctctacatgtccctccaccgatacgatgagggtctcttctttccaaattcagaagatgcatcacatgacaaggttggcattgggaagggggcaggatacaatgtgaacatcccttggaatggcggaaagatgggggatgtggaatatttaatggcgtttcacagagtggtgatgcccattgcttatgagtttaaccctcagctagttctcatatcggctgggtttgacgcggcccgtggggatccacttgggggctgccaggtgagccctgaaggttatgcccatatgacacaccttctgatgagcctggcaggtggcagagtcatcctggtgctagagggtgggtacaatctcacatccatctccgagtccatggttatgtgcacccgatcgctcttgggggaccccccaccagttctgtctgacctgcgacctccaaaatcatcagctttgaactccgtttgcaaagtccgtcaggcacatcgcaaatactggcgcagccttcggctaaatgtggtaggacctccccccaagtctactcagggagcaaaaaatctccagcattccccaatgaggaactctccccgtaaaggaagatttgctgcagaggctggacccttaacagagagcaagatctcttctcaaggagcttcatctccaaaaaaaatcccctcagaagtgacagtcacccccctggcatcaccactgagctcagtctccatagaagagacacctatcccattgataccagacagcaaattctccccagaagaggtagccaaccaatttgtatctgcagagactgctgttcagttcgctgcaccacagtacaagatgtccacagaggaggtagccaataagctggcatcacctcaaggactgacatcacttgaaagtacaagcagtcagctggtatccaacagggaagcgattgcgccagcatgggaacatgaaacccccaaatctcctcccaccgcagacagccagaaagtacctatgggaggattagtagcagcagaagacattgcagatgccctagcagagaggggccttacaatggagatattggggtgctctgagcagcgagagaatgtgtgtaaatgtaaagcatctccacaatccttgcagcatgaggacaagttattagacgttcagtctccaggggtgagaattgcatccgggaaagagagtgaggcaccagtgcccccctgttccactgttgaggaaagacctttagaacaaattctcagagacttgcagttgagtgatgatgcgtccagcagttcctccattgccatggctcatacagctgacttggatcctagggacagagccataaggaaatcctttatcactacaggaagagacactccggaggaagagtatacagagggcagttatatacaggtggctaatgcaccacccaatgagcaggagctgctggacgaggctgcggggggctcggaagctggaaactccaccataggctttgaggtttttctgaactctatggaggatgagtcggatgtgggatttgcagtcatgccgctgtcctggtgtcctcacttgggctctgtgtgtgctgtgccccgggatggtgtggatgtgagccagccgtgtgcccagtgtggcagtgaactggagaactggctctgtctgacttgttaccaggtgctgtgtggcaggtatgtctcccaacacatgctgagccatggactcacctctggacatcaccttgttctcagcttctctgacttgtctgtgtggtgctacggctgtgagtcctatgtacataacgaggccttgtttccagccaaatctgctgcctacagctccaagtttgaggagtaggaggtagacgcgatataagggctgctgttccggaggggcctttttgccaaatttccattttaaatattttatttaatgtataaaatcttttagccaaaaaaaaaaaaaaa

SEQ ID NO: 649 - DNA, 2448 bp, Xenopus laevis
aaagagaaaaagaagagtcattagaaaccttagcggttttcttcgtggccttgttccgtgtggtgcacaccttttaatttcatatctagttgtgacaaacaaatctcatggtgaccatgaagctgtttgccttggtgttgctggtgtctgccagcgtatttgctgctgatgatgatgacaagaaagaagatgttgggactgtggttggaattgatttgggcacaacatactcctgtgttggagtgtttaaaaacgggcgtgtagaaattattgccaatgaccagggtaaccgtatcacaccctcttatgtggcattcaccccagaaggtgagcgtctcattggagatgctgcaaaaaaccaacttacatctaatcctgagaacactgtgttcgatgccaagcgtctgattggtcgtacatggaatgacccctcagttcagcaggacataaagtacctgccttttaaggtcattgagaagaaaacaaagccttacattcaagtcaatattggagatcagatgaaaacatttgccccagaagagatttctgctatggtgctggttaagatgaaggaaactgcagaggcttacttgggcaaaaaggttactcatgctgttgtaactgtacctgcttatttcaatgatgcacagcgtcaagccaccaaggatgcaggagttattgctgggctgaatgttatgaggatcatcaatgaaccaactgctgcagctattgcttatggtctggacaaaagagaaggagagaagaacatccttgtgtttgacttgggtggtggtacttttgatgtttccctacttacaattgataatggcgtatttgaagtggtggctacaaatggagatacccatcttggtggtgaagactttgaccagagagtaatggagcatttcatcaagctgtacaagaagaaaactggcaaggatgtcagaaaggataacagagctgtacagaaacttcgcagagaggtggagaaagccaagagggcattgtcagcccagcatcaatctagaattgagattgagtctttctttgaaggagaagatttctctgaaactctgacaagagccaagtttgaagagttgaatatggaccttttccgttccactatgaagccagtacagaaagtccttgatgatgctgacctaaaaaaatctgacattgatgaaattgtgcttgttggtggctctactcgtatcccaaaaatccagcaattggtgaaagaattcttcaatggcaaggagccttcccgtggtatcaatcccgatgaggctgttgcatatggtgcagctgttcaagctggagtactttctggtgaccaggatactggtgacttggttctccttgatgtgtgccctcttactcttggtattgagactgtcggaggtgtcatgacaaaactcattcccagaaacactgttgtacccaccaaaaagtcacagatcttctctaccgcttctgacaaccagcccactgtcactatcaaagtttatgaaggtgagcgtccactgaccaaggataaccatctcctgggcacttttgacttgactggaattccccctgcaccccgaggagttcctcagattgaggtcacttttgaaatcgatgtgaatggtattctgcgtgttactgcagaggacaagggcactggcaacaagaacaagattaccattacaaacgatcagaaccgtctaacacctgaggaaatcgagaggatggtaactgatgcagagaaatttgcagaagaggacaaaaagttgaaggagcgtattgacactcggaatgaattggagagctatgcctactcattaaagaaccagataggtgataaggagaagcttggaggaaaactttcttcagaagacaaggagaccattgagaaggctgtagaagaaaagatcgaatggttagaaagccaccaggatgctgatattgaagacttcaaggccaaaaagaaggaattggaagaaattgttcaaccaattgtaggcaaactatatggtggagctggtgcaccccctccagaaggtgccgaggagactgagaaggatgaattgtaggccatcgatgtgcctctggctgctataatattgtaaatactgaactcagaacttttttgtgttgagagaaaatattgggggaaaaacttaaaatacatgtggattcttcacctcctggtggagacatgttaagccgcaatggctctactgctttttattagcagtcttctcacccagatcattatttttgttcaactgtttgcccggggagggaggtgggcctggtattatggaagggttgggttaagctttgtttcaaagttgctctaagatgtcttatttatttgcaaaatggtcctgcattctaagtagaactttttctaccaccattgaccataataaatgtttgataattaaaaaaaaaaaaaaaaaa

SEQ ID NO: 650 - DNA, 3426 bp, Xenopus laevis
taaagtcacgtatagtgaaatttagagtttgtcttggtgccaacatgggtagggtgggagttttagtcttagtgaccatcctttgttccaagggtcactccgttcctatcgccagcaagtcccctctaaccattttatttccaggggacatccagagtggcacaactgatatggaactggctgagagctacctcctacagtttgggtatcttatccaagaacagggctcaaatgccactttacaaaatgcgctcaccattatgcaacagaaactgggactgaaggagactggagtcctagatgctgaaacactggaggccatgaaaagacctcgctgtggggttccagatattggacaattcaacacatttgagggggatttaaagtgggatcacaatgatatcacttaccgtattctgaactactcccctgacctggaccctgaagtgatcgatgatgccttcgcccgcgcattcaaagtctggagtgatgtcacacctctgtccttcactcgtatatacagcggggaacctgatattaacattctgtttgggactgaggaccatggggatccttacccctttgataggaaggatggtctcttggctcatgcttaccctcctggccctggggtgcagggtgatgctcactttgatgatgatgaattttggacactgggtactggaactgtggtaaagactcgctttgggaatgctgaaggggctctgtgtcgcttcccattcacatttgatggacagtcgttctccacctgtacaactgctggacgctcagatgggttgccttggtgcagcaccactcccaattatgatcaggataaaaaatacggcttctgccccagcgagatgctctacacatatggaggcaacagtaatgggcagccttgtgttttaccatttatcttcgacggagtgtcatataatggttgtaccaaggaaggccgccaagatgggtatcgctggtgcagcactactgccaactttgaccaagacaagaaatacggattttgccctaaccgagacacatctgtgattggtggaaactcccaaggagagccttgtgtctttccattcacattcctggggaagatacacaattcctgcactacagatggccgggatgacagaaagttgtggtgtgccaccacctccaactatgacctagacagcaagtggggattctgccctgatcaagggtacagtcttttcctggtggcagcccatgagtttggccatgcacttggtctggatcacagtgatgtgcaagatgctctcatgtaccccatgtacagctatgtgaaagatttccagcttcatcaagatgacgtgcgcgggatccaatttctatatggtacaggttcaggcgctcctcctaaccccaatccaccaaagcccaccaagaagccattagctaccaaacgtcccagaaccaccacaagacctgtacctccagtgaacccggcacaagatgcctgtaatgtggagatgtttgatgccattgcagacctacagggagctcttcacttcttcaaagatgggttgtattggactctgactcccagaagtaagaattctcctcagtctcctctgcgcatctcagatacatggccagccctccccagcaaaattgatactgcattccaggaccccaccagcaaaagcatttttttcttctcagggagcaagttctggcagtacacaggtacaagtgctataggcccacgcagcatcgagaagttgggtctgagtaaggatgtggaggctatcatgggatcttttgctcgtgataatggaaaggccctgttattcaatggagaacaatactggaggcttaatctaaagacattgactattgataatggctacccacggcagacagctgacaactatcctggtgttccgggtgactcccatgatgtttttctctatcaaggaaactattacttctgccaggatcaatacttctggcgtgtgacatcacgaaagcaacaagatatggttggatatgtcagctatgacctccttcgttgcccacagaattaaatggggagctaggagaaatggggctgccggatactattggggacactgagatgattgattttgattggggaaaggagtagtgcatttcagattttgattcaagccctcctttgcagtgaaaaatgaggtcaatattacagaaagcaatgccagtcattctggtatagtttagattatctatagggtggcaaataaatatatgcattccctcttttgcattcagactgccccatgtctattgctttgaggcctcctagggacacaccataggttgggatcttctcccatacattggcatgaaaacaaaaggaatctacagatattgtgcctatgaattcaacaaataggatgtaattgttttactaactgagtttattttgtagaaataaggtattgccagatgaacttatgtatcctgtgatattatatatgtctgctgtctttgcatggtttgaaaggcctttacccaatagcagttttcttttcccacaatgttaaaccattattgtgatgcatctagaagtgtccaagagagggtgaatattacactttgcagggatggctgccattcttagaggggtggttcacctttaaaggaattgttcagtataaaaataaaaactaggttaatagatagactgtgcaaaataaaacatgtttctaatatagttaggcaaaaatgtttttattttcatactgaactgttcctttaagttaaattttagtatgttatagaatggccagttctaagcatcttttcaattgatcttcgttatttatttattttttccagctttcaaataggggtcatctatacaaatgctctttaaagctacaaagtatagttaatgctacttttaattactcatctttgtattcaggcccctccttttcatattccagtcttgtattcaaatcactgcataattgctagggtaagttggaccctagcaacaagattgctaaaactgtagagttgctgacgaaaaaggctaaataactcaaagaccacaaatagtaaaaaatgaaaaccaattgcaagttgtcttagaatatcactctctgcatcatactaaaagttaaatcaaagatgaacagcccctttaaaagaacatctggcctaagctgctcaagtgaagtagcctgtagcaaccattgggaaaggagaaaatgaaagcataggtctgctgaaggcaactgcagtgtgaaattttcattaatgcttttctagggtggaatgtgtctgtggaatgtgtgtgtctgatttgcgcgtcaggtgtatattctgaattacatgtaaatggaacaagatgtgacctgtactaatatcactttataatataaataaagcattttctgctcagcc

SEQ ID NO: 651 - DNA, 1152 bp, Xenopus laevis
ccccctcgtttctgctcacttggatggatcgtcccattgtgtagaccatgcacagacacttccgcaactggatcttctatgtctttctctgctttgggatcatctacatgaaattaggagctttatcatccgtggtggctttgggagcgaacatcatctgcaataaaatcccagggctggcgcctcggcaaagagcgatctgtgaaagccgaccagatgccatcataattattggcgaaggggcacaaatgggaatcaatgaatgtcagtaccaattccgctacgggcgatggaactgctcggcgctgggggaaagaacggtcttcggtcaagagctgcgagtaggaagccgggaagccgcattcacgtacgccatcactgctgctggagttgcccacgctgtgacatccgcatgcagccagggcaacttgagtaactgcggctgtgaccgggagaaacaaggctactataaccaggaggaaggctggaagtggggaggctgctcggctgacattaaatatggcatcgatttttccagaaaatttgtagacgctcgagaaatcaagaagaatgcgcggaggctcatgaacttgcacaacaatgaggcgggaagaaaggtgctggaagaaaggatgaaactggagtgcaaatgtcatggtgtttcgggctcctgtaccacaaaaacctgctggaacacgttgcctaaattccgagaaattggatttgtcctaaaggagaagtacaacgacgcggtgcacgtagaggtggtgagagccaatcgcttacggcagcccacctttctgaagatcaaaaaagtccgaagttaccagaaacccatggagacggacttggtctacattgagaggtcccccaactactgtgaggaggacagcgccactgggagtgtggggacgcaaggacggctttgtaaccgcacttctccatacactgatggctgtgaccttatgtgctgtgggcgtggctacaatacccaccagtatacgaaagtttggcaatgcaactgtaagttccactggtgctgttttgtgaaatgcaatacctgcagtgaaaggacagaggttttcacctgcaaataaggcactccggtgacagtcattggaaaggcatggaccattgtggcgtcattttgca
